United States Patent Application Publication US 2006/0003323 A1 - sequence listing, part 2

SEQ ID NO: 177 - DNA, 11158 bp, Homo sapiens
  CDS (77)..(10786)
caattggtctagggtctcccccattggaatatccatcagtgatgagaaatacaacgtttgttgagttttctctagcatgagaagaatttgcgcggcttgctggggtctggcgctcgtttcgggctgggcgacctttcagcagatgtccccgtcgcgcaatttcagcttccgcctcttccccgagaccgcgcccggggcccccgggagtatccccgcgccgcccgctcctggcgacgaagcggcggggagcagagtggagcggctgggccaggcgttccgcgtgcggctgctgcgggagctcagcgagcgcctggagcttgtcttcctggtggatgattcgtccagcgtgggcgaagtcaacttccgcagcgagctcatgttcgtccgcaagctgctgtccgacttccccgtggtgcccacggccacgcgcgtggccatcgtgaccttctcgtccaagaactacgtggtgccgcgcgtcgattacatctccacccgccgcgcgcgccagcacaagtgcgcgctgctcctccaagagatccctgccatctcctaccgaggtggcggcacctacaccaagggcgccttccagcaagccgcgcaaattcttcttcatgctagagaaaactcaacaaaagttgtatttctcatcactgatggatattccaatgggggagaccctagaccaattgcagcgtcactgcgagattcaggagtggagatcttcacttttggcatatggcaagggaacattcgagagctgaatgacatggcttccaccccaaaggaggagcactgttacctgctacacagttttgaagaatttgaggctttagtcgccctctgtcatatgttatttgtagatctaccttctgggagttttattcaagatgatatggtccactgctcatatctttgtgatgaaggcaaggactgctgtgaccgaatgggaagctgcaaatgtgggaaacacacaggccattttgagtgcatctgtgaaaaggggtataacgggaaaggtctgcagtatgactgcacagtttgcccatcggggacatacaaacctgaaggctcaccaggaggaatcagcagttgcattccatgtcctgatgaaaatcacacctctccacctggaagcacatcccctgaagactgtgtctgcagagagggatacagggcatctggccagacctgtgaagttgtccactgccctgccctgaagcctcccgaaaatggttactttatccaaaacacttgcaacaaccacttcaatgcagcctgtggggtccgatgtcaccctggatttgatcttgtgggaagcagcatcatcttatgtctacccaatggtttgtggtccggttcagagagctactgcagagtaagaacatgtcctcatctccgccagccgaaacatggccacatcagctgttctacaagggaaatgttatataagacaacatgtttggttgcctgtgatgaagggtacaggctagaaggcagtgataagcttacttgtcaaggaaacagccagtgggatgggccagaaccccggtgtgtggagcgccactgttccacctttcagatgcccaaagatgtcatcatatccccccacaactgtggcaagcagccagccaaatttgggacgatctgctatgtaagttgccgccaagggttcattttatctggagtcaaagaaatgctgagatgtaccacttctggaaaatggaatgtcggagttcaggcagctgtgtgtaaagacgtggaggctcctcaaatcaactgtcctaaggacatagaggctaagactctggaacagcaagattctgccaatgttacctggcagattccaacagctaaagacaactctggtgaaaaggtgtcagtccacgttcatccagctttcaccccaccttaccttttcccaattggagatgttgctatcgtatacacggcaactgacctatccggcaaccaggccagctgcattttccatatcaaggttattgatgcagaaccacctgtcatagactggtgcagatctccacctcccgtccaggtctcggagaaggtacatgccgcaagctgggatgagcctcagttctcagacaactcaggtgctgaattggtcattaccagaagtcatacacaaggagaccttttccctcaaggggagactatagtacagtatacagccactgacccctcaggcaataacaggacatgtgatatccatattgtcataaaaggttctccctgtgaaattccattcacacctgtaaatggggattttatatgcactccagataatactggagtcaactgtacattaacttgcttggagggctatgatttcacagaagggtctactgacaagtattattgtgcttatgaagatggcgtctggaaaccaacatataccactgaatggccagactgtgccagtaagcgttttgcaaaccacgggttcaagtcctttgagatgttctacaaagcagctcgttgtgatgacacagatctgatgaagaagttttctgaagcatttgagacgaccctgggaaaaatggtcccatcattttgtagtgatgcagaggacattgactgcagactggaggagaacctgaccaaaaaatattgcctagaatataattatgactatgaaaatggctttgcaattggtccaggtggctggggtgcagctaataggctggattactcttacgatgacttcctggacactgtgcaagaaacagccacaagcatcggcaatgccaagtcctcacggattaaaagaagtgccccattatctgactataaaattaagttaatttttaacatcacagctagtgtgccattacccgatgaaagaaatgatacccttgaatgggaaaatcagcaacgactccttcagacattggaaactatcacaaataaactgaaaaggactctcaacaaagaccccatgtattcctttcagcttgcatcagaaatacttatagccgacagcaattcattagaaacaaaaaaggcttcccccttctgcagaccaggctcagtgctgagagggcgtatgtgtgtcaattgccctttgggaacctattataatctggaacatttcacctgtgaaagctgccggatcggatcctatcaagatgaagaagggcaacttgagtgcaagctttgcccctctgggatgtacacggaatatatccattcaagaaacatctctgattgtaaagctcagtgtaaacaaggcacctactcatacagtggacttgagacttgtgaatcgtgtccactgggcacttatcagccaaaatttggttcccggagctgcctctcgtgtccagaaaacacctcaactgtgaaaagaggagccgtgaacatttctgcatgtggagttccttgtccagaaggaaaattctcgcgttctgggttaatgccctgtcacccatgtcctcgtgactattaccaacctaatgcagggaaggccttctgcctggcctgtcccttttatggaactaccccattcgctggttccagatccatcacagaatgttcaagttttagttcaactttctcagcggcagaggaaagtgtggtgccccctgcctctcttggacatattaaaaagaggcatgaaatcagcagtcaggcaagtcatgaatgcttctttaacccttgccacaatagtggaacctgccagcaacttgggcgtggttatgtttgtctctgtccacttggatatacaggtttaaagtgtgaaacagacatcgatgagtgcagcccactgccttgcctcaacaatggagtttgtaaagacctagttggggaattcatttgtgagtgcccatcaggttacacaggtaagcactgtgaattgaacatcaatgaatgtcagtctaatccatgtagaaatcaggccacctgtgtggatgaattaaattcatacagttgtaaatgtcagccaggattttcaggcaaaaggtgtgaaacaggtatgtatcaactcagtgttattaataaccttaataatgcagtctgtgaagaccaggttgggggattcttgtgcaaatgcccacctggatttttgggtacccgatgtggaaagaacgtcgatgagtgtctcagtcagccatgcaaaaatggagctacctgtaaagacggtgccaatagcttcaggtgcctgtgtgcagctggcttcacaggatcacactgtgaattgaacatcaatgaatgtcagtctaatccatgtagaaatcaggccacctgtgtggatgaattaaattcatacagttgtaaatgtcagccaggattttcaggcaaaaggtgtgaaacagaacagtctacaggctttaacctggattttgaagtttctggcatctatggatatgtcatgctagatggcatgctcccatctctccatgctctaacctgtaccttctggatgaaatcctctgacgacatgaactatggaacaccaatctcctatgcagttgataacggcagcgacaataccttgctcctgactgattataacgggtgggttctttatgtgaatggcagggaaaagataacaaactgtccctcggtgaatgatggcagatggcatcatattgcaatcacttggacaagtactggtggagcctggagggtctatataaatggggaattatctgacggtggtactggcctctccattggcaaagccatacctggtggcggtgcattagttcttgggcaagagcaagacaaaaaaggagaggggttcaacccggctgagtcttttgtgggctccataagccagctcaacctctgggactatgtcctgtctccacagcaggtgaagtcactggctacctcctgcccagaggaactcagtaaaggaaacgtgttagcatggcctgatttcttgtcaggaattgtggggaaagtgaagatcgattctaagagcatattttgttctgattgcccacgcttgggagggtcagtgcctcatctgagaactgcatctgaagatttaaaaccaggttccaaagtcaatctgttctgtgaaccaggcttccagctggtcgggaaccctgtgcagtactgtctgaatcaaggacagtggacacaaccactcccccactgtgaacgcattcgctgtggggtgccacctcctttggagaatggcttccattcagccgatgacttctatgctggcagcacagtaacctaccagtgcaacaatggctactatctattgggtgactcaaggatgttctgtacagataatgggagctggaacggcgtttcaccatcctgcttagatgtcgatgagtgtgcagttggatcagattgtagtgagcatgcttcttgcctgaacgtagatggatcctacatatgttcatgtgtcccaccgtacacaggagatgggaaaaactgtgcagaacctataaaatgtaaggctccaggaaatccggaaaatggccactcctcaggtgagatttatacagtaggtgccgaagtcacattttcgtgtcaggaaggataccagttgatgggagtaaccaaaatcacatgtttggagtctggagaatggaatcatctaataccatattgtaaagctgtttcatgtggtaaaccggctattccagaaaatggttgcattgaggagttagcatttacttttggcagcaaagtgacatataggtgtaataaaggatatactctggccggtgataaagaatcatcctgtcttgctaacagttcttggagtcattcccctcctgtgtgtgaaccagtgaagtgttctagtccggaaaatataaataatggaaaatatattttgagtgggcttacctacctttctactgcatcatattcatgcgatacaggatacagcttacagggcccttccattattgaatgcacggcttctggcatctgggacagagcgccacctgcctgtcacctcgtcttctgtggagaaccacctgccatcaaagatgctgtcattacggggaataacttcactttcaggaacaccgtcacttacacttgcaaagaaggctatactcttgctggtcttgacaccattgaatgcctggccgacggcaagtggagtagaagtgaccagcagtgcctggctgtctcctgtgatgagccacccattgtggaccacgcctctccagagactgcccatcggctctttggagacattgcattctactactgctctgatggttacagcctagcagacaattcccagcttctctgcaatgcccagggcaagtgggtacccccagaaggtcaagacatgccccgttgtatagctcatttctgtgaaaaacctccatcggtttcctatagcatcttggaatctgtgagcaaagcaaaatttgcagctggctcagttgtgagctttaaatgcatggaaggctttgtactgaacacctcagcaaagattgaatgtatgagaggtgggcagtggaacccttcccccatgtccatccagtgcatccctgtgcggtgtggagagccaccaagcatcatgaatggctatgcaagtggatcaaactacagttttggagccatggtggcttacagctgcaacaaggggttctacatcaaaggggaaaagaagagcacctgcgaagccacagggcagtggagtagtcctataccgacgtgccacccggtatcttgtggtgaaccacctaaggttgagaatggctttctggagcatacaactggcaggatctttgagagtgaagtgaggtatcagtgtaacccgggctataagtcagtcggaagtcctgtatttgtctgccaagccaatcgccactggcacagtgaatcccctctgatgtgtgttcctctcgactgtggaaaacctcccccgatccagaatggcttcatgaaaggagaaaactttgaagtagggtccaaggttcagtttttctgtaatgagggttatgagcttgttggtgacagttcttggacatgtcagaaatctggcaaatggaataagaagtcaaatccaaagtgcatgcctgccaagtgcccagagccgcccctcttggaaaaccagctagtattaaaggagttgaccaccgaggtaggagttgtgacattttcctgtaaagaagggcatgtcctgcaaggcccctctgtcctgaaatgcttgccatcccagcaatggaatgactctttccctgtttgtaagattgttctttgtaccccacctcccctaatttcctttggtgtccccattccttcttctgctcttcattttggaagtactgtcaagtattcttgtgtaggtgggtttttcctaagaggaaattctaccaccctctgccaacctgatggcacctggagctctccactgccagaatgtgttccagtagaatgtccccaacctgaggaaatccccaatggaatcattgatgtgcaaggccttgcctatctcagcacagctctctatacctgcaagccaggctttgaattggtgggaaatactaccaccctttgtggagaaaatggtcactggcttggaggaaaaccaacatgtaaagccattgagtgcctgaaacccaaggagattttgaatggcaaattctcttacacggacctacactatggacagaccgttacctactcttgcaaccgaggctttcggctcgaaggtcccagtgccttgacctgtttagagacaggtgattgggatgtagatgccccatcttgcaatgccatccactgtgattccccacaacccattgaaaatggttttgtagaaggtgcagattacagctatggtgccataatcatctacagttgcttccctgggtttcaggtggctggtcatgccatgcagacctgtgaagagtcaggatggtcaagttccatcccaacatgtatgccaatagactgtggcctccctcctcatatagattttggagactgtactaaactcaaagatgaccagggatattttgagcaagaagacgacatgatggaagttccatatgtgactcctcaccctccttatcatttgggagcagtggctaaaacctgggaaaatacaaaggagtctcctgctacacattcatcaaactttctgtatggtaccatggtttcatacacctgtaatccaggatatgaacttctggggaaccctgtgctgatctgccaggaagatggaacttggaatggcagtgcaccatcctgcatttcaattgaatgtgacttgcctactgctcctgaaaatggctttttgcgttttacagagactagcatgggaagtgctgtgcagtatagctgtaaacctggacacattctagcaggctctgacttaaggctttgtctagagaatagaaagtggagtggtgcctccccacgctgtgaagccatttcatgcaaaaagccaaatccagtcatgaatggatccatcaaaggaagcaactacacatacctgagcacgttgtactatgagtgtgaccccggatatgtgctgaatggcactgagaggagaacatgccaggatgacaaaaactgggatgaggatgagcccatttgcattcctgtggactgcagttcacccccagtctcagccaatggccaggtgagaggagacgagtacacattccaaaaagagattgaatacacttgcaatgaagggttcttgcttgagggagccaggagtcgggtttgtcttgccaatggaagttggagtggagccactcccgactgtgtgcctgtcagatgtgccaccccgccacaactggccaatggggtgacggaaggcctggactatggcttcatgaaggaagtaacattccactgtcacgagggctacatcttgcacggtgctccaaaactcacctgtcagtcagatggcaactgggatgcagagattcctctctgtaaaccagtcaactgtggacctcctgaagatcttgcccatggtttccctaatggtttttcctttattcatgggggccatatacagtatcagtgctttcctggttataagctccatggaaattcatcaagaaggtgcctctccaatggctcctggagtggcagctcaccttcctgcctgccttgcagatgttccacaccagtaattgaatatggaactgtcaatgggacagattttgactgtggaaaggcagcccggattcagtgcttcaaaggcttcaagctcctaggactttctgaaatcacctgtgaagccgatggccagtggagctctgggttcccccactgtgaacacacttcttgtggttctcttccaatgataccaaatgcgttcatcagtgagaccagctcttggaaggaaaatgtgataacttacagctgcaggtctggatatgtcatacaaggcagttcagatctgatttgtacagagaaaggggtatggagccagccttatccagtctgtgagcccttgtcctgtgggtccccaccgtctgtcgccaatgcagtggcaactggagaggcacacacctatgaaagtgaagtgaaactcagatgtctggaaggttatacgatggatacagatacagatacattcacctgtcagaaagatggtcgctggttccctgagagaatctcctgcagtcctaaaaaatgtcctctcccggaaaacataacacatatacttgtacatggggacgatttcagtgtgaataggcaagtttctgtgtcatgtgcagaagggtatacctttgagggagttaacatatcagtatgtcagcttgatggaacctgggagccaccattctccgatgaatcttgcagtccagtttcttgtgggaaacctgaaagtccagaacatggatttgtggttggcagtaaatacacctttgaaagcacaattatttatcagtgtgagcctggctatgaactagaggggaacagggaacgtgtctgccaggagaacagacagtggagtggaggggtggcaatatgcaaagagaccaggtgtgaaactccacttgaatttctcaatgggaaagctgacattgaaaacaggacgactggacccaacgtggtatattcctgcaacagaggctacagtcttgaagggccatctgaggcacactgcacagaaaatggaacctggagccacccagtccctctctgcaaaccaaatccatgccctgttccttttgtgattcccgagaatgctctgctgtctgaaaaggagttttatgttgatcagaatgtgtccatcaaatgtagggaaggttttctgctgcagggccacggcatcattacctgcaaccccgacgagacgtggacacagacaagcgccaaatgtgaaaaaatctcatgtggtccaccagctcacgtagaaaatgcaattgctcgaggcgtacattatcaatatggagacatgatcacctactcatgttacagtggatacatgttggagggtttcctgaggagtgtttgtttagaaaatggaacatggacatcacctcctatttgcagagctgtctgtcgatttccatgtcagaatgggggcatctgccaacgcccaaatgcttgttcctgtccagagggctggatggggcgcctctgtgaagaaccaatctgcattcttccctgtctgaacggaggtcgctgtgtggccccttaccagtgtgactgcccgcctggctggacggggtctcgctgtcatacagctgtttgccagtctccctgcttaaatggtggaaaatgtgtaagaccaaaccgatgtcactgtctttcttcttggacgggacataactgttccaggaaaaggaggactgggttttaaccactgcacgaccatctggctctcccaaaagcaggatcatctctcctcggtagtgcctgggcatcctggaacttatgcaaagaaagtccaacatggtgctgggtcttgtttagtaaacttgttacttggggttactttttttattttgtgatatattttgttattccttgtgacatactttcttacatgtttccatttttaaatatgcctgtattttctatataaaaattatattaaatagatgctgctctaccctcacaaaatgtacatattctgctgtctattgggaaagttcctggtacacatttttattcagttacttaaaatgatttttccattaaagtatattttgctactaaataaaaaaaa

SEQ ID NO: 178 - protein, 3570 aa, Homo sapiens
MRRICAACWGLALVSGWATFQQMSPSRNFSFRLFPETAPGAPGSIPAPPAPGDEAAGSRVERLGQAFRVRLLRELSERLELVFLVDDSSSVGEVNFRSELMFVRKLLSDFPVVPTATRVAIVTFSSKNYVVPRVDYISTRRARQHKCALLLQEIPAISYRGGGTYTKGAFQQAAQILLHARENSTKVVFLITDGYSNGGDPRPIAASLRDSGVEIFTFGIWQGNIRELNDMASTPKEEHCYLLHSFEEFEALVALCHMLFVDLPSGSFIQDDMVHCSYLCDEGKDCCDRMGSCKCGKHTGHFECICEKGYNGKGLQYDCTVCPSGTYKPEGSPGGISSCIPCPDENHTSPPGSTSPEDCVCREGYRASGQTCEVVHCPALKPPENGYFIQNTCNNHFNAACGVRCHPGFDLVGSSIILCLPNGLWSGSESYCRVRTCPHLRQPKHGHISCSTREMLYKTTCLVACDEGYRLEGSDKLTCQGNSQWDGPEPRCVERHCSTFQMPKDVIISPHNCGKQPAKFGTICYVSCRQGFILSGVKEMLRCTTSGKWNVGVQAAVCKDVEAPQINCPKDIEAKTLEQQDSANVTWQIPTAKDNSGEKVSVHVHPAFTPPYLFPIGDVAIVYTATDLSGNQASCIFHIKVIDAEPPVIDWCRSPPPVQVSEKVHAASWDEPQFSDNSGAELVITRSHTQGDLFPQGETIVQYTATDPSGNNRTCDIHIVIKGSPCEIPFTPVNGDFICTPDNTGVNCTLTCLEGYDFTEGSTDKYYCAYEDGVWKPTYTTEWPDCASKRFANHGFKSFEMFYKAARCDDTDLMKKFSEAFETTLGKMVPSFCSDAEDIDCRLEENLTKKYCLEYNYDYENGFAIGPGGWGAANRLDYSYDDFLDTVQETATSIGNAKSSRIKRSAPLSDYKIKLIFNITASVPLPDERNDTLEWENQQRLLQTLETITNKLKRTLNKDPMYSFQLASEILIADSNSLETKKASPFCRPGSVLRGRMCVNCPLGTYYNLEHFTCESCRIGSYQDEEGQLECKLCPSGMYTEYIHSRNISDCKAQCKQGTYSYSGLETCESCPLGTYQPKFGSRSCLSCPENTSTVKRGAVNISACGVPCPEGKFSRSGLMPCHPCPRDYYQPNAGKAFCLACPFYGTTPFAGSRSITECSSFSSTFSAAEESVVPPASLGHIKKRHEISSQASHECFFNPCHNSGTCQQLGRGYVCLCPLGYTGLKCETDIDECSPLPCLNNGVCKDLVGEFICECPSGYTGKHCELNINECQSNPCRNQATCVDELNSYSCKCQPGFSGKRCETGMYQLSVINNLNNAVCEDQVGGFLCKCPPGFLGTRCGKNVDECLSQPCKNGATCKDGANSFRCLCAAGFTGSHCELNINECQSNPCRNQATCVDELNSYSCKCQPGFSGKRCETEQSTGFNLDFEVSGIYGYVMLDGMLPSLHALTCTFWMKSSDDMNYGTPISYAVDNGSDNTLLLTDYNGWVLYVNGREKITNCPSVNDGRWHHIAITWTSTGGAWRVYINGELSDGGTGLSIGKAIPGGGALVLGQEQDKKGEGFNPAESFVGSISQLNLWDYVLSPQQVKSLATSCPEELSKGNVLAWPDFLSGIVGKVKIDSKSIFCSDCPRLGGSVPHLRTASEDLKPGSKVNLFCEPGFQLVGNPVQYCLNQGQWTQPLPHCERIRCGVPPPLENGFHSADDFYAGSTVTYQCNNGYYLLGDSRMFCTDNGSWNGVSPSCLDVDECAVGSDCSEHASCLNVDGSYICSCVPPYTGDGKNCAEPIKCKAPGNPENGHSSGEIYTVGAEVTFSCQEGYQLMGVTKITCLESGEWNHLIPYCKAVSCGKPAIPENGCIEELAFTFGSKVTYRCNKGYTLAGDKESSCLANSSWSHSPPVCEPVKCSSPENINNGKYILSGLTYLSTASYSCDTGYSLQGPSIIECTASGIWDRAPPACHLVFCGEPPAIKDAVITGNNFTFRNTVTYTCKEGYTLAGLDTIECLADGKWSRSDQQCLAVSCDEPPIVDHASPETAHRLFGDIAFYYCSDGYSLADNSQLLCNAQGKWVPPEGQDMPRCIAHFCEKPPSVSYSILESVSKAKFAAGSVVSFKCMEGFVLNTSAKIECMRGGQWNPSPMSIQCIPVRCGEPPSIMNGYASGSNYSFGAMVAYSCNKGFYIKGEKKSTCEATGQWSSPIPTCHPVSCGEPPKVENGFLEHTTGRIFESEVRYQCNPGYKSVGSPVFVCQANRHWHSESPLMCVPLDCGKPPPIQNGFMKGENFEVGSKVQFFCNEGYELVGDSSWTCQKSGKWNKKSNPKCMPAKCPEPPLLENQLVLKELTTEVGVVTFSCKEGHVLQGPSVLKCLPSQQWNDSFPVCKIVLCTPPPLISFGVPIPSSALHFGSTVKYSCVGGFFLRGNSTTLCQPDGTWSSPLPECVPVECPQPEEIPNGIIDVQGLAYLSTALYTCKPGFELVGNTTTLCGENGHWLGGKPTCKAIECLKPKEILNGKFSYTDLHYGQTVTYSCNRGFRLEGPSALTCLETGDWDVDAPSCNAIHCDSPQPIENGFVEGADYSYGAIIIYSCFPGFQVAGHAMQTCEESGWSSSIPTCMPIDCGLPPHIDFGDCTKLKDDQGYFEQEDDMMEVPYVTPHPPYHLGAVAKTWENTKESPATHSSNFLYGTMVSYTCNPGYELLGNPVLICQEDGTWNGSAPSCISIECDLPTAPENGFLRFTETSMGSAVQYSCKPGHILAGSDLRLCLENRKWSGASPRCEAISCKKPNPVMNGSIKGSNYTYLSTLYYECDPGYVLNGTERRTCQDDKNWDEDEPICIPVDCSSPPVSANGQVRGDEYTFQKEIEYTCNEGFLLEGARSRVCLANGSWSGATPDCVPVRCATPPQLANGVTEGLDYGFMKEVTFHCHEGYILHGAPKLTCQSDGNWDAEIPLCKPVNCGPPEDLAHGFPNGFSFIHGGHIQYQCFPGYKLHGNSSRRCLSNGSWSGSSPSCLPCRCSTPVIEYGTVNGTDFDCGKAARIQCFKGFKLLGLSEITCEADGQWSSGFPHCEHTSCGSLPMIPNAFISETSSWKENVITYSCRSGYVIQGSSDLICTEKGVWSQPYPVCEPLSCGSPPSVANAVATGEAHTYESEVKLRCLEGYTMDTDTDTFTCQKDGRWFPERISCSPKKCPLPENITHILVHGDDFSVNRQVSVSCAEGYTFEGVNISVCQLDGTWEPPFSDESCSPVSCGKPESPEHGFVVGSKYTFESTIIYQCEPGYELEGNRERVCQENRQWSGGVAICKETRCETPLEFLNGKADIENRTTGPNVVYSCNRGYSLEGPSEAHCTENGTWSHPVPLCKPNPCPVPFVIPENALLSEKEFYVDQNVSIKCREGFLLQGHGIITCNPDETWTQTSAKCEKISCGPPAHVENAIARGVHYQYGDMITYSCYSGYMLEGFLRSVCLENGTWTSPPICRAVCRFPCQNGGICQRPNACSCPEGWMGRLCEEPICILPCLNGGRCVAPYQCDCPPGWTGSRCHTAVCQSPCLNGGKCVRPNRCHCLSSWTGHNCSRKRRTGF

SEQ ID NO: 179 - DNA, 2127 bp, Homo sapiens
  CDS (1)..(2127)
cggccgtgggcgacctttcagcagatgtccccgtcgcgcaatttcagcttccgcctcttccccgagaccgcgcccggggcccccgggagtatccccgcgccgcccgctcctggcgacgaagcggcggggagcagagtggagcggctgggccaggcgttccggcgacgcgtgcggctgctgcgggagctcagcgagcgcctggagcttgtcttcctggtggatgattcgtccagcgtgggcgaagtcaacttccgcagcgagctcatgttcgtccgcaagctgctgtccgacttccccgtggtgcccacggccacgcgcgtggccatcgtgaccttctcgtccaagaactacgtggtgccgcgcgtcgattacatctccacccgccgcgcgcgccagcacaagtgcgcgctgctcctccaagagatccctgccatctcctaccgaggtggcggcacctacaccaagggcgccttccagcaagccgcgcaaattcttcttcatgctagagaaaactcaacaaaagttgtatttctcatcactgatggatattccaatgggggagaccctagaccaattgcagcgtcactgcgagattcaggagtggagatcttcacttttggcatatggcaagggaacattcgagagctgaatgacatggcttccaccccaaaggaggagcactgttacctgctacacagttttgaagaatttgaggctttagctcgccgggcattgcatgaagatctaccttctgggagttttattcaagatgatatggtccactgctcatatctttgtgatgaaggcaaggactgctgtgaccgaatgggaagctgcaaatgtgggacacacacaggccattttgagtgcatctgtgaaaaggggtattacgggaaaggtctgcagtatgaatgcacagcttgcccatcggggacatacaaacctgaagcctcaccaggaggaatcagcagttgcattccatgtcctgatgaaaatcacacctctccacctggaagcacatcccctgaagactgtgtctgcagagagggatacagggcatctggccagacctgtgaacttgtccactgccctgccctgaagcctcccgaaaatggttactttatccaaaacacttgcaacaaccacttcaatgcagcctgtggggtccgatgtcaccctggatttgatcttgtgggaagcagcatcatcttatgtctacccaatggtttgtggtccggttcagagagctactgcagagtaagaacatgtcctcatctccgccagccgaaacatggccacatcagctgttctacaagggaaatgttatataagacaacatgtttggttgcctgtgatgaagggtacagactagaaggcagtgataagcttacttgtcaaggaaacagccagtgggatgggccagaaccccggtgtgtggagcgccactgttccacctttcagatgcccaaagatgtcatcatatccccccacaactgtggcaagcagccagccaaatttgggacgatctgctatgtaagttgccgccaagggttcattttatctggagtcaaagaaatgctgagatgtaccacttctggaaaatggaatgtcggagttcaggcagctgtgtgtaaagacgtggaggctcctcaaatcaactgtcctaaggacatagaggctaagactctggaacagcaagattctgccaatgttacctggcagattccaacagctaaagacaactctggtgaaaaggtgtcagtccacgttcatccagctttcaccccaccttaccttttcccaattggagatgttgctatcgtatacacggcaactgacctatccggcaaccaggccagctgcattttccatatcaaggttattgatgcagaaccacctgtcatagactggtgcagatctccacctcccgtccaggtctcggagaaggtacatgccgcaagctgggatgagcctcagttctcagacaactcaggggctgaattggtcattaccagaagtcatacacaaggagaccttttccctcaaggggagactatagtacagtatacagccactgacccctcaggcaataataggacatgtgatatccatattgtcatactcgag

SEQ ID NO: 180 - protein, 709 aa, Homo sapiens
RPWATFQQMSPSRNFSFRLFPETAPGAPGSIPAPPAPGDEAAGSRVERLGQAFRRRVRLLRELSERLELVFLVDDSSSVGEVNFRSELMFVRKLLSDFPVVPTATRVAIVTFSSKNYVVPRVDYISTRRARQHKCALLLQEIPAISYRGGGTYTKGAFQQAAQILLHARENSTKVVFLITDGYSNGGDPRPIAASLRDSGVEIFTFGIWQGNIRELNDMASTPKEEHCYLLHSFEEFEALARRALHEDLPSGSFIQDDMVHCSYLCDEGKDCCDRMGSCKCGTHTGHFECICEKGYYGKGLQYECTACPSGTYKPEASPGGISSCIPCPDENHTSPPGSTSPEDCVCREGYRASGQTCELVHCPALKPPENGYFIQNTCNNHFNAACGVRCHPGFDLVGSSIILCLPNGLWSGSESYCRVRTCPHLRQPKHGHISCSTREMLYKTTCLVACDEGYRLEGSDKLTCQGNSQWDGPEPRCVERHCSTFQMPKDVIISPHNCGKQPAKFGTICYVSCRQGFILSGVKEMLRCTTSGKWNVGVQAAVCKDVEAPQINCPKDIEAKTLEQQDSANVTWQIPTAKDNSGEKVSVHVHPAFTPPYLFPIGDVAIVYTATDLSGNQASCIFHIKVIDAEPPVIDWCRSPPPVQVSEKVHAASWDEPQFSDNSGAELVITRSHTQGDLFPQGETIVQYTATDPSGNNRTCDIHIVILE

SEQ ID NO: 181 - DNA, 2127 bp, Homo sapiens
  CDS (1)..(2127)
cggccgtgggcgacctttcagcagatgtccccgtcgcgcaatttcagcttccgcctcttccccgagaccgcgcccggggcccccgggagtatccccgcgccgcccgctcctggcgacgaagcggcggggagcagagtggagcggctgggccaggcgttccggcgacgcgtgcggctgctgcgggagctcagcgagcgcctggagcttgtcttcctggtggatgattcgtccagcgtgggcgaagtcaacttccgcagcgagctcatgttcgtccgcaagctgctgtccgacttccccgtggtgcccacggccacgcgcgtggccatcgtgaccttctcgtccaagaactacgtggtgccgcgcgtcgattacatctccacccgccgcgcgcgccagcacaagtgcgcgctgctcctccaagagatccctgccatctcctaccgaggtggcggcacctacaccaagggcgccttccagcaagccgcgcaaattcttcttcatgctagagaaaactcaacaaaagttgtatctctcatcactgatggatattccaatgggggagaccctagaccaattgcagcgtcactgcgagattcaggagtggagatcttcacttttggcatatggcaagggaacattcgagagctgaatgacatggcttccaccccaaaggaggagcactgttacctgctacacagttttgaagaatttgaggctttagctcgccgggcattgcatgaagatctaccttctgggagttttattcaagatgatatggtccactgctcatatctttgtgatgaaggcaaggactgctgtgaccgaatgggaagctgcaaatgtgggacacacacagaccgttttgagtgcatctgtgaaaaggggtattacgggaaaggtctgcagtatgaatgcacagcttgcccatcggggacatacaaacctgaaggctcaccaggaggaatcagcagttgcattccatgtcctgatgaaaatcacacctctccacctggaagcacatcccctgaagactgtgtctgcagagagggatacagggcatctggccagacctgtgaacttgtccactgccctgccctgaagcctcccgaaaatggttactttatccaaaacacttgcaacaaccacttcaatgcagcctgtggggtccgatgtcaccctggatttgatcttgtgggaagcagcatcatcttatgtctacccaatggtttgtggtccggttcagagagctactgcagagtaagaacatgtcctcatctccgccagccgaaacatggccacatcagctgttctacaagggaaatgttatataagacaacatgtttggttgcctgtgatgaagggtacagactagaaggcagtgataagcttacttgtcaaggaaacagccagtgggatgggccagaaccccggtgtgtggagcgccactgttccacctttcagatgcccaaagatatcatcatatccccccacaactgtggcaagcagccagccaaatttgggacgatctgctatgtaagttgccgccaagggttcattttatctggagtcaaagaaatgctgagatgtaccacttctggaaaatggaatgtaggagttcaggcagctgtgcgtaaagacgtggaggctcctcaaatcaactgtcctaaggacatagaggctaagactctggaacagcaagattccgccaatgttacctggcagattccaacagctaaagacaactctggtgaaaaggtgtcagtccacgttcatccagctttcaccccaccttaccttttcccaattggagatgttgctatcgtatacacggcaactgacctatccggcaaccaggccagctgcattttccatatcaaggttattgatgcagaaccacctgtcatagactggtgcagatctccacctcccgtccaggtctcggagaaggtacatgccgcaagctgggatgagcctcagttctcagacaactcaggggctgaattggtcattaccagaagtcatacacaaggagaccttttccctcaaggggagactatagtacagtatacagccactgacccctcaggcaataacaggacatgtgatatccatattgtcatactcgag

SEQ ID NO: 182 - protein, 709 aa, Homo sapiens
RPWATFQQMSPSRNFSFRLFPETAPGAPGSIPAPPAPGDEAAGSRVERLGQAFRRRVRLLRELSERLELVFLVDDSSSVGEVNFRSELMFVRKLLSDFPVVPTATRVAIVTFSSKNYVVPRVDYISTRRARQHKCALLLQEIPAISYRGGGTYTKGAFQQAAQILLHARENSTKVVSLITDGYSNGGDPRPIAASLRDSGVEIFTFGIWQGNIRELNDMASTPKEEHCYLLHSFEEFEALARRALHEDLPSGSFIQDDMVHCSYLCDEGKDCCDRMGSCKCGTHTDRFECICEKGYYGKGLQYECTACPSGTYKPEGSPGGISSCIPCPDENHTSPPGSTSPEDCVCREGYRASGQTCELVHCPALKPPENGYFIQNTCNNHFNAACGVRCHPGFDLVGSSIILCLPNGLWSGSESYCRVRTCPHLRQPKHGHISCSTREMLYKTTCLVACDEGYRLEGSDKLTCQGNSQWDGPEPRCVERHCSTFQMPKDIIISPHNCGKQPAKFGTICYVSCRQGFILSGVKEMLRCTTSGKWNVGVQAAVRKDVEAPQINCPKDIEAKTLEQQDSANVTWQIPTAKDNSGEKVSVHVHPAFTPPYLFPIGDVAIVYTATDLSGNQASCIFHIKVIDAEPPVIDWCRSPPPVQVSEKVHAASWDEPQFSDNSGAELVITRSHTQGDLFPQGETIVQYTATDPSGNNRTCDIHIVILE

SEQ ID NO: 183 - DNA, 2127 bp, Homo sapiens
  CDS (1)..(2127)
cggccgtgggcgacctttcagcagatgtccccgtcgcgcaatttcagcttccgcctcttccccgagaccgcgcccggggcccccgggagtatccccgcgccgcccgctcctggcgacgaagcggcggggagcagagtggagcggctgggccaggcgttccggcgacgcgtgcggctgctgcgggagctcagcgagcgcctggagcttgtcttcctggtggatgattcgtccagcgtgggcgaagtcaacttccgcagcgagctcatgttcgtccgcaagctgctgtccgacttccccgtggtgcccacggccacgcgcgtggccatcgtgaccttctcgtccaagaactacgtggtgccgcgcgtcgattacatctccacccgccgcgcgcgccagcacaagtgcgcgctgctcctccaagagatccctgccatctcctaccgaggtggcggcacctacatcaagggcgccttccagcaagccgcgcaaattcttcttcatgctagagaaaactcaacaaaagttgtatttctcatcactgatggatattccaatgggggagaccctagaccaattgcagcgtcactgcgagattcaggagtggagatcttcacttttggcatatggcaagggaacattcgagagctgaatgacatggcttccaccccaaaggaggagcactgttacctgctacacagttttgaagaatttgaggctttagctcgccgggcattgcatgaagatctaccttctgggagttttattcaagatgatatggtccactgctcatatctttgtgatgaaggcaaggactgctgtgaccgaatgggaagctgcaaatgtgggacacacacaggccattttgagtgcatctgtgaaaaggggtattacgggaaaggtctgcagtatgaatgcacagcttgcccatcggggacatacaaacctgaaggctcaccaggaggaatcagcagttgcattccatgtcctgatgaaaatcacacctctccacctggaagcacatcccctgaagactgtgtctgcagagagggatacagggcatctggccagacctgtgaacttgtccactgccctgccctgaagcctcccgaaaatggttactttatccaaaacacttgcaacaaccacttcaatgcagcctgtggggtccgatgtcaccctggatttgatcttgtgggaagcagcatcatcttatgtctacccaatggtttgtggtccggttcagagagctactgcagagtaagaacatgtcctcatctccgccagccgaaacatggccacatcagctgttctacaagggaaatgttatataagacaacatgtttggttgcctgtgatgaagggtacagactagaaggcagtgataagcttacttgtcaaggaaacagccagtgggatgggccagaaccccggtgtgtggagcgccactgttccacctttcagatgcccaaagatgtcatcatatccccccacaactgtggcaagcagccagccaaatttgggacgatctgctatgtaagttgccgccaagggttcattttatctggagtcaaagaaatgctgagatgcaccacttctggaaaatggaatgtcggagttcaggcagctgtgtgtaaagacgtggaggctcctcaaatcaactgtcctaaggacatagaggctaagactctggaacagcaagattctgccaatgttacctggcagattccaacagctaaagacaactctggtgaaaaggtgtcagtccacgttcatccagctttcaccccaccttaccttttcccaattggagatgttgctatcgtatacacggcaactgacctatccggcaaccaggccagctgcattttccatatcaaggttattgatgcagaaccacctgtcatagactggtgcagatctccacctcccgtccaggtctcggagaaggtacatgccgcaagctgggatgagcctcagttctcagacaactcaggggccgaattggtcattaccagaagtcatacacaaggagaccttttccctcaaggggagactatagtacagtatacagccactgacccctcaggcaataacaggacatgtgatatccatattgtcatactcgag

SEQ ID NO: 184 - protein, 709 aa, Homo sapiens
RPWATFQQMSPSRNFSFRLFPETAPGAPGSIPAPPAPGDEAAGSRVERLGQAFRRRVRLLRELSERLELVFLVDDSSSVGEVNFRSELMFVRKLLSDFPVVPTATRVAIVTFSSKNYVVPRVDYISTRRARQHKCALLLQEIPAISYRGGGTYIKGAFQQAAQILLHARENSTKVVFLITDGYSNGGDPRPIAASLRDSGVEIFTFGIWQGNIRELNDMASTPKEEHCYLLHSFEEFEALARRALHEDLPSGSFIQDDMVHCSYLCDEGKDCCDRMGSCKCGTHTGHFECICEKGYYGKGLQYECTACPSGTYKPEGSPGGISSCIPCPDENHTSPPGSTSPEDCVCREGYRASGQTCELVHCPALKPPENGYFIQNTCNNHFNAACGVRCHPGFDLVGSSIILCLPNGLWSGSESYCRVRTCPHLRQPKHGHISCSTREMLYKTTCLVACDEGYRLEGSDKLTCQGNSQWDGPEPRCVERHCSTFQMPKDVIISPHNCGKQPAKFGTICYVSCRQGFILSGVKEMLRCTTSGKWNVGVQAAVCKDVEAPQINCPKDIEAKTLEQQDSANVTWQIPTAKDNSGEKVSVHVHPAFTPPYLFPIGDVAIVYTATDLSGNQASCIFHIKVIDAEPPVIDWCRSPPPVQVSEKVHAASWDEPQFSDNSGAELVITRSHTQGDLFPQGETIVQYTATDPSGNNRTCDIHIVILE

SEQ ID NO: 185 - DNA, 2127 bp, Homo sapiens
  CDS (1)..(2127)
cggccgtgggcgacctttcagcagatgtccccgtcgcgcaatttcagcttccgcctcttccccgagaccgcgcccggggcccccgggagtatccccgcgccgcccgctcctggcgacgaagcggcggggagcagagtggagcggctgggccaggcgttccggcgacgcgtgcggctgctgcgggagctcagcgagcgcctggagcttgtcttcctggtggatgattcgtccagcgtgggcgaagtcaacttccgcagcgagctcatgttcgtccgcaagctgctgtccgacttccccgtggtgcccacggccacgcgcgtggccatcgtgaccttctcgtccaagaactacgtggtgccgcgcgccgattacatctccacccgccgcgcgcgccagcacaagtgcgcgctgctcctccaagagatccctgccatctcctaccggggtggcggcacctacaccaagggcgccttccagcaagccgcgcaaattcttcttcatgctagagaaaactcagcaaaagttgtatttctcatcactgatggatattccaatgggggagaccctagaccaattgcagcgtcactgcgagattcaggagtggagatcttcacttttggcatatggcaagggaacattcgagagctgaatgacatggcttccaccccaaaggaggagcactgttacctgctacacagttttgaagaatttgaggctttagctcgccgggcattgcatgaagatctaccttctgggagttttattcaagatgatatggtccactgctcatatctttgtgatgaaggcaaggactgctgtgaccgaatgggaagctgcaaatgtgggacacacacaggccattttgagtgcatctgtgaaaaggggtattacgggaagggtctgcagtatgaatgcacagcttgcccatcggggacatacaaacctgaaggctcaccaggaggaatcagcagttgcattccatgtcctgatgaaaatcacacctctccacctggaagcacatcccctgaagactgtgtctgcagagagggatacagggcatctggccagacctgtgaacttgtccactgccctgccctgaagcctcccgaaaatggttactttatccaaaacacttgcaacaaccacttcaatgcagcctgtggggtccgatgtcaccctggatttgatcttgtgggaagcagcatcatcttatgtctacccaatggtttgtggtccggttcagagagctactgcagagtaagaacatgtcctcatctccgccagccgaaacatggccacatcagctgttctacaagggaaatgttatataagacaacatgtttggttgcctgtgatgaagggtacagactagaaggcagtgataagcttacttgtcaaggaaacagccagtgggatgggccagaaccccggtgtgtggagcgccactgttccacctttcagatgcccaaagatatcatcatatccccccacaactgtggcaagcagccagccaaatttgggacgatctgctatgtaagtcgccgccaagggttcattttatctggagtcaaagaaatgctgagatgtaccacttctggaaaatggaatgtcggagttcaggcagctgtgtgtaaagacgtggaggctcctcaaatcaactgtcctaaggacatagaggctaagactctggaacagcaagattctgccaatgttacctggcagattccaacagctaaagacaactctggtgaaaaggtgtcagtccacgttcatccagctttcaccccaccttaccttttcccaattggagatgttgctatcgtatacacggcaactgacctatccggcaaccaggccagctgcattttccatatcaaggttattgatgcagaaccacctgtcatagactggtgcagatctccacctcccgtccaggtctcggagaaggtacatgccgcaagctgggatgagcctcagttctcagacaactcaggggctgaattggtcattaccagaagtcatacacaaggagaacttttccctcaaggggagactatagtacagtatacagccactgacccctcaggcaataacaggacatgtgatatccatattgtcatactcgag

SEQ ID NO: 186 - protein, 709 aa, Homo sapiens
RPWATFQQMSPSRNFSFRLFPETAPGAPGSIPAPPAPGDEAAGSRVERLGQAFRRRVRLLRELSERLELVFLVDDSSSVGEVNFRSELMFVRKLLSDFPVVPTATRVAIVTFSSKNYVVPRADYISTRRARQHKCALLLQEIPAISYRGGGTYTKGAFQQAAQILLHARENSAKVVFLITDGYSNGGDPRPIAASLRDSGVEIFTFGIWQGNIRELNDMASTPKEEHCYLLHSFEEFEALARRALHEDLPSGSFIQDDMVHCSYLCDEGKDCCDRMGSCKCGTHTGHFECICEKGYYGKGLQYECTACPSGTYKPEGSPGGISSCIPCPDENHTSPPGSTSPEDCVCREGYRASGQTCELVHCPALKPPENGYFIQNTCNNHFNAACGVRCHPGFDLVGSSIILCLPNGLWSGSESYCRVRTCPHLRQPKHGHISCSTREMLYKTTCLVACDEGYRLEGSDKLTCQGNSQWDGPEPRCVERHCSTFQMPKDIIISPHNCGKQPAKFGTICYVSRRQGFILSGVKEMLRCTTSGKWNVGVQAAVCKDVEAPQINCPKDIEAKTLEQQDSANVTWQIPTAKDNSGEKVSVHVHPAFTPPYLFPIGDVAIVYTATDLSGNQASCIFHIKVIDAEPPVIDWCRSPPPVQVSEKVHAASWDEPQFSDNSGAELVITRSHTQGELFPQGETIVQYTATDPSGNNRTCDIHIVILE

SEQ ID NO: 187 - DNA, 1952 bp, Homo sapiens
  CDS (470)..(1687)
ttcaggaacaccgtcacttacacttgcaaagaaggctatactcttgctggtcttgacaccattgaatgcctggccgacggcaagtggagtagaagtgaccagcagtgcctggctgtctcctgtgatgagccacccattgtggaccacgcctctccagagactgcccatcggctctttggagacattgcattctactactgctctgatggttacagcctagcagacaattcccagcttctctgcaatgcccagggcaagtgggtacccccagaaggtcaagacatgccccgttgtatagctcatttctgtgaaaaacctccatcggtttcctatagcatcttggaatctgtgagcaaagcaaaatttgcagctggctcagttgtgagctttaaatgcatggaaggctttgtactgaacacctcagcaaagattgaatgtatgagaggtgggcagtggaacccttccccccatgtccatccagtgcatccctgtgcggtgtggagagccaccaagcatcatgaatggctatgcaagtggatcaaactacagttttggagccatggtggcttacagctgcaacaaggggttctacatcaaaggggaaaagaagagcacctgcgaagccacagggcagtggagtagtcctataccgacgtgccacccggtatcttgtggtgaaccacctaaggttgagaatggctttctggagcatacaactggcaggatctttgagagtgaagtgaggtatcagtgtaacccgggctataagtcagtcggaagtcctgtatttgtctgccaagccaatcgccactggcacagtgaatcccctctgatgtgtgttcctctcgactgtggaaaacctcccccgatccagaatggcttcatgaaaggagaaaactttgaagtagggtccaaggttcagtttttctgtaatgagggttatgagcttgttggggacagttcttggacatgtcagaaatctggcaaatggaataagaagtcaaatccaaagtgcatgcctgccaagtgcccagagccgcccctcttggaaaaccagctagtattaaaggagttgaccaccgaggtaggagttgtgacattttcctgtaaagaagggcatgtcctgcaaggcccctctgtcctgaaatgcttgccatcccagcaatggaatgactctttccctgtttgtaagattgttctttgtaccccacctcccctaatttcctttggtgtccccattccttcttctgctcttcattttggaagtactgtcaagtattcttgtgtaggtgggtttttcctaagaggaaattctaccaccctctgccaacctgatggcacctggagctctccactgccagaatgtgttccagtagaatgtccccaacctgaggaaatccccaatggaatcattgatgtgcaaggccttgcctatctcagcacagctctctatacctgcaagccaggctttgaattggtgggaaatactaccaccctttgtggagaaaatggtcactggcttggaggaaaaccaacatgtaaagccattgagtgcctgaaacccaaggagattttgaatggcaaattctcttacacggacctacactatggacagaccgttacctactcttgcaaccgaggctttcggctcgaagggtcccagtgccttgacctgtttagagacaggtgattgggatgtagatgccccatcttgcaatgccatccactgtgattccccacaacccattgaaaatggttttgtagaaggtgcagattacagctatggtgccataatcatctacagttgcttccctgggtttcaggtggctggtcatgccatgcagacctgtgaagagtcaggatggtcactcgtgcccccaacatgtatgccaatagactgtggcctccctcctcatatagattttggagactgtactaaactcaaagatgac

SEQ ID NO: 188 - protein, 406 aa, Homo sapiens
MSIQCIPVRCGEPPSIMNGYASGSNYSFGAMVAYSCNKGFYIKGEKKSTCEATGQWSSPIPTCHPVSCGEPPKVENGFLEHTTGRIFESEVRYQCNPGYKSVGSPVFVCQANRHWHSESPLMCVPLDCGKPPPIQNGFMKGENFEVGSKVQFFCNEGYELVGDSSWTCQKSGKWNKKSNPKCMPAKCPEPPLLENQLVLKELTTEVGVVTFSCKEGHVLQGPSVLKCLPSQQWNDSFPVCKIVLCTPPPLISFGVPIPSSALHFGSTVKYSCVGGFFLRGNSTTLCQPDGTWSSPLPECVPVECPQPEEIPNGIIDVQGLAYLSTALYTCKPGFELVGNTTTLCGENGHWLGGKPTCKAIECLKPKEILNGKFSYTDLHYGQTVTYSCNRGFRLEGSQCLDLFRDR

SEQ ID NO: 189 - DNA, 1709 bp, Homo sapiens
  CDS (413)..(1444)
cagagtcttgctctgtctcccaggctggagtgcagtggcacaatctcagctcactgcaacctctgcctcctgggttcaagtgattctcctgcctcagcttcccaaatggctgagattacaggcacataccaccatgcctagctaatttttgtacaggtttcaccatgttggccaggctggtctcgaactcctaacctcaagtgttcctcctgcctcggcctcccaaagtgctgggattgtaggcatgaatcgtcatgccgagcctaagttgactttctactatcattttcacttatttaaaaaaatagaatggatctattggaaaaaccataaatcattatttgcttacttcctaattgattcattttaacatagaccttttagtttttttcactatccaaggatttagttaatgctatcatctgttatacaaatcgcactcacttgctttcttcctgttgcacagcatacaactggcaggatctttgagagtgaagtgaggtatcagtgtaacccgggctataagtcagtcggaagtcctgtatttgtctgccaagccaatcgccactggcacagtgaatcccctctgatgtgtgttcctctcgactgtggaaaacctcccccgatccagaatggcttcatgaaaggagaaaactttgaagtagggtccaaggttcagtttttctgtaatgagggttatgagcttgttggggacagttcttggacatgtcagaaatctggcaaatggaataagaagtcaaatccaaagtgcatgcctgccaagtgcccagagccgcccctcttggaaaaccagctagtattaaaggagttgaccaccgaggtaggagttgtgacattttcctgtaaagaagggcatgtcctgcaaggcccctctgtcctgaaatgcttgccatcccagcaatggaatgactctttccctgtttgtaagattgttctttgtaccccacctcccctaatttcctttggtgtccccattccttcttctgctcttcattttggaagtactgtcaagtattcttgtgtaggtgggtttttcctaagaggaaattctaccaccctctgccaacctgatggcacctggagctctccactgccagaatgtgttccagtagaatgtccccaacctgaggaaatccccaatggaatcattgatgtgcaaggccttgcctatctcagcacagctctctatacctgcaagccaggctttgaattggtgggaaatactaccaccctttgtggagaaaatggtcactggcttggaggaaaaccaacatgtaaagccattgagtgcctgaaacccaaggagattttgaatggcaaattctcttacacggacctacactatggacagaccgttacctactcttgcaaccgaggctttcggctcgaagggtcccagtgccttgacctgtttagagacaggtgattgggatgtagatgccccatcttgcaatgccatccactgtgattccccacaacccattgaaaatggttttgtagaaggtgcagattacagctatggtgccataatcatctacagttgcttccctgggtttcaggtggctggtcatgccatgcagacctgtgaagagtcaggatggtcactcgtgcccccaacatgtatgccaatagactgtggcctccctcctcatatagattttggagactgtactaaactcaaagatgac

SEQ ID NO: 190 - protein, 344 aa, Homo sapiens
MLSSVIQIALTCFLPVAQHTTGRIFESEVRYQCNPGYKSVGSPVFVCQANRHWHSESPLMCVPLDCGKPPPIQNGFMKGENFEVGSKVQFFCNEGYELVGDSSWTCQKSGKWNKKSNPKCMPAKCPEPPLLENQLVLKELTTEVGVVTFSCKEGHVLQGPSVLKCLPSQQWNDSFPVCKIVLCTPPPLISFGVPIPSSALHFGSTVKYSCVGGFFLRGNSTTLCQPDGTWSSPLPECVPVECPQPEEIPNGIIDVQGLAYLSTALYTCKPGFELVGNTTTLCGENGHWLGGKPTCKAIECLKPKEILNGKFSYTDLHYGQTVTYSCNRGFRLEGSQCLDLFRDR

SEQ ID NO: 191 - DNA, 6153 bp, Homo sapiens
  CDS (1)..(6150)
  misc_feature (1100)..(1100): Wherein n may be a, c, g or t
  misc_feature (1099)..(1101): Wherein Xaa may be Xaa or Ser or Trp or Leu
atggcgggcgcccctcccccagcctcgttgccgccttgcagtttgatctcagactgctgtgctagcaatcagcgagattccgtgggcgtaggaccctctgagccaggtgtgggatatagtctcgtggtgcgccgtttcttaagccggtctgaaaagcgcaatattcgggtgggagtgacccgattttccagctatactcttgctggtcttgacaccattgaatgcctggccgacggcaagtggagtagaagtgaccagcagtgcctggctgtctcctgtgatgagccacccattgtggaccacgcctctccagagactgcccatcggctctttggagacattgcattctactactgctctgatggttacagcctagcagacaattcccagcttctctgcaatgcccagggcaagtgggtacccccagaaggtcaagacatgccccgttgtatagctcatttctgtgaaaaacctccatcggtttcctatagcatcttggaatctgtgagcaaagcaaaatttgcagctggctcagttgtgagctttaaatgcatggaaggctttgtactgaacacctcagcaaagattgaatgtatgagaggtgggcagtggaacccttcccccatgtccatccagtgcatccctgtgcggtgtggagagccaccaagcatcatgaatggctatgcaagtggatcaaactacagttttggagccatggtggcttacagctgcaacaaggggttctacatcaaaggggaaaagaagagcacctgcgaagccacagggcagtggagtagtcctataccgacgtgccacccggtatcttgtggtgaaccacctaaggttgagaatggctttctggagcatacaactggcaggatctttgagagtgaagtgaggtatcagtgtaacccgggctataagtcagtcggaagtcctgtatttgtctgccaagccaatcgccactggcacagtgaatcccctctgatgtgtgttcctctcgactgtggaaaacctcccccgatccagaatggcttcatgaaaggagaaaactttgaagtagggtccaagggtcagtttttctgtaatgaagggttatngagctttgttggggacagttcttggacatgtcagaaatctggcaaatggaataagaagtcaaatccaaagtgcatgcctgccaagtgcccagagccgcccctcttggaaaaccagctagtattaaaggagttgaccaccgaggtaggagttgtgacattttcctgtaaagaaaggcatgtcctgcaaggcccctctgtcctgaaatgcttgccatcccagcaatggaatgactctttccctgtttgtaagattgttctttgtaccccacctcccctaatttcctttggtgtccccattccttcttctgctcttcattttggaagtactgtcaagtattcttgtgtaggtgggtttttcctaagaggaaattctaccaccctctgccaacctgatggcacctggagctctccactgccagaatgtgttccagtagaatgtccccaacctgaggaaatccccaatggaatcattgatgtgcaaggccttgcctatctcagcacagctctctatacctgcaagccaggctttgaattggtgggaaatactaccaccctttgtggagaaaatggtcactggcttggaggaaaaccaacatgtaaagccattgagtgcctgaaacccaaggagattttgaatggcaaattctcttacacggacctacactatggacagaccgttacctactcttgcaaccgaggctttcggctcgaaggtcccagtgccttgacctgtttagagacaggtgattgggatgtagatgccccatcttgcaatgccatccactgtgattccccacaacccattgaaaatggttttgtagaaggtgcagattacagctatggtgccataatcatctacagttgcttccctgggtttcaggtggctggtcatgccatgcagacctgtgaagagtcaggatggtcaagttccatcccaacatgtatgccaatagactgtggcctccctcctcatatagattttggagactgtactaaactcaaagatgaccagggatattttgagcaagaagacgacatgatggaagttccatatgtgactcctcaccctccttatcatttgggagcagtggctaaaacctgggaaaatacaaaggagtctcctgctacacattcatcaaactttctgtatggtaccatggtttcatacacctgtaatccaggatatgaacttctggggaaccctgtgctgatctgccaggaagatggaacttggaatggcagtgcaccatcctgcatttcaattgaatgtgacttgcctactgctcctgaaaatggctttttgcgttttacagagactagcatgggaagtgctgtgcagtatagctgtaaacctggacacattctagcaggctctgacttaaggctttgtctagagaatagaaagtggagtggtgcctccccacgctgtgaagccatttcatgcaaaaagccaaatccagtcatgaatggatccatcaaaggaagcaactacacatacctgagcacgttgtactatgagtgtgaccccggatatgtgctgaatggcactgagaggagaacatgccaggatgacaaaaactgggatgaggatgagcccatttgcattcctgtggactgcagttcacccccagtctcagccaatggccaggtgagaggagacgagtacacattccaaaaagagattgaatacacttgcaatgaagggttcttgcttgagggagccaggagtcgggtttgtcttgccaatggaagttggagtggagccactcccgactgtgtgcctgtcagatgtgccaccccgccacaactggccaatggggtgacggaaggcctggactatggcttcatgaaggaagtaacattccactgtcacgagggctacatcttgcacggtgctccaaaactcacctgtcagtcagatggcaactgggatgcagagattcctctctgtaaaccagtcaactgtggacctcctgaagatcttgcccatggtttccctaatggtttttcctttattcatgggggccatatacagtatcagtgctttcctggttataagctccatggaaattcatcaagaaggtgcctctccaatggctcctggagtggcagctcaccttcctgcctgccttgcagatgttccacaccagtaattgaatatggaactgtcaatgggacagattttgactgtggaaaggcagcccggattcagtgcttcaaaggcttcaagctcctaggactttctgaaatcacctgtgaagccgatggccagtggagctctgggttcccccactgtgaacacacttcttgtggttctcttccaatgataccaaatgcgttcatcagtgagaccagctcttggaaggaaaatgtgataacttacagctgcaggtctggatatgtcatacaaggcagttcagatctgatttgtacagagaaaggggtatggagccagccttatccagtctgtgagcccttgtcctgtgggtccccaccgtctgtcgccaatgcagtggcaactggagaggcacacacctatgaaagtgaagtgaaactcagatgtctggaaggttatacgatggatacagatacagatacattcacctgtcagaaagatggtcgctggttccctgagagaatctcctgcagtcctaaaaaatgtcctctcccggaaaacataacacatatacttgtacatggggacgatttcagtgtgaataggcaagtttctgtgtcatgtgcagaagggtatacctttgagggagttaacatatcagtatgtcagcttgatggaacctgggagccaccattctccgatgaatcttgcagtccagtttcttgtgggaaacctgaaagtccagaacatggatttgtggttggcagtaaatacacctttgaaagcacaattatttatcagtgtgagcctggctatgaactagagaatttggctgtgaatccatctggtcctggacttttcttggttgacaggaccctcagctgcaggtcggagttggctagaggtccaatccagaccctgtttgcctgggtatcagcagcagagggtgcagaacagcggatattggtgaaccgcaaatgctgctgcctgatcattcctctggaagttttgtctcagaggaatacccggccatgtgaggtgtcagtccgcccctactggggggggaacagggaacgtgtctgccaggagaacagacagtggagtggaggggtggcaatatgcaaagagaccaggtgtgaaactccacttgaatttctcaatgggaaagctgacattgaaaacaggacgactggacccaacgtggtatattcctgcaacagaggctacagtcttgaagggccatctgaggcacactgcacagaaaatggaacctggagccacccagtccctctctgcaaaccaaatccatgccctgttccttttgtgattcccgagaatgctctgctgtctgaaaaggagttttatgttgatcagaatgtgtccatcaaatgtagggaaggttttctgctgcagggccacggcatcattacctgcaaccccgacgagacgtggacacagacaagcgccaaatgtgaaagaagatatacacaacagcccaagtccctgaattttcagctagcagcttattgcagtattagaatgtttattttgcggggaggggttcaagatggccaactagaaacagctgtggccggagcctcccaccgagaagaacaaaaacaaaagcgagaaaaagcaaggtggtacaacggcccacctgggagccacatggggcaagcagagctcccacccccagccaaaggaggtggacctccctgcgggaatttcagcaactccagccaggggtttatgaacagacctctgatctccctgagatggagcccctggggctccatgtggccatggtctccacagatcagcaggcttagtccttcccctgctggctctgaggaatccaggcaggctggactagtgggattccccacagcacagtttacctgctctgccaaggggcagctagagcgctttgttaagcgagtccctgatcccatgcctcctgattgggatgagacccccccacaacaggggtcacggatgagacccccccacaacaggggtcaccagacaccttatacaagggtgttcctgctagcatcaggtcagtgcccctctgggacagagctcccagaggaaagagcaggcagccatctttgctgttctgcagcgtccgctggaaaagcacagaattgggcagaggctaggattgatgaattgaaagaagtaggcttcagaaagtgggtaataatgaagttcgctgagctaaaggaacatgttctaaaccaatgcaaagacgccaagaaccaggataaaacattacaggatccgttaaccagaataaccagtttagaaaggaatgtaaatgacctgatggagctgaaaaacacaacacgagaacttcacaatgcaacaacaaaacaaggccaacattccagttcaggaaatccagagaaccccagtaagatactccatgagaagatcaaccccaagacacataatcctcaggttctccaagaaatctcatgtggtccaccagctcacgtagaaaatgcaattgctcgaggcgtacattatcaatatggagacatgatcacctactcatgttacagtggatacatgttggagggtttcctgaggagtgtttgtttagaaaatggaacatggacatcacctcctatttgcagagctgtctgtcgatttccatgtcagaatgggggcatctgccaacgcccaaatgcttgttcctgtccagagggctggatggggcgcctctgtgaagaaccaatctgcattcttccctgtctgaacggaggtcgctgtgtggccccttaccagtgtgactgcccgcctggctggacggggtctcgctgtcatacaggtaggcctctttcatggtttgttttcttggtggctcaggcccatgaaactccagaggacattgaagagtgtgacttagactcagaagtggtggcaaaatga

SEQ ID NO: 192 - protein, 2050 aa, Homo sapiens
  misc_feature (367)..(367): Wherein Xaa may be any naturally occurring amino acid
MAGAPPPASLPPCSLISDCCASNQRDSVGVGPSEPGVGYSLVVRRFLSRSEKRNIRVGVTRFSSYTLAGLDTIECLADGKWSRSDQQCLAVSCDEPPIVDHASPETAHRLFGDIAFYYCSDGYSLADNSQLLCNAQGKWVPPEGQDMPRCIAHFCEKPPSVSYSILESVSKAKFAAGSVVSFKCMEGFVLNTSAKIECMRGGQWNPSPMSIQCIPVRCGEPPSIMNGYASGSNYSFGAMVAYSCNKGFYIKGEKKSTCEATGQWSSPIPTCHPVSCGEPPKVENGFLEHTTGRIFESEVRYQCNPGYKSVGSPVFVCQANRHWHSESPLMCVPLDCGKPPPIQNGFMKGENFEVGSKGQFFCNEGLXSFVGDSSWTCQKSGKWNKKSNPKCMPAKCPEPPLLENQLVLKELTTEVGVVTFSCKERHVLQGPSVLKCLPSQQWNDSFPVCKIVLCTPPPLISFGVPIPSSALHFGSTVKYSCVGGFFLRGNSTTLCQPDGTWSSPLPECVPVECPQPEEIPNGIIDVQGLAYLSTALYTCKPGFELVGNTTTLCGENGHWLGGKPTCKAIECLKPKEILNGKFSYTDLHYGQTVTYSCNRGFRLEGPSALTCLETGDWDVDAPSCNAIHCDSPQPIENGFVEGADYSYGAIIIYSCFPGFQVAGHAMQTCEESGWSSSIPTCMPIDCGLPPHIDFGDCTKLKDDQGYFEQEDDMMEVPYVTPHPPYHLGAVAKTWENTKESPATHSSNFLYGTMVSYTCNPGYELLGNPVLICQEDGTWNGSAPSCISIECDLPTAPENGFLRFTETSMGSAVQYSCKPGHILAGSDLRLCLENRKWSGASPRCEAISCKKPNPVMNGSIKGSNYTYLSTLYYECDPGYVLNGTERRTCQDDKNWDEDEPICIPVDCSSPPVSANGQVRGDEYTFQKEIEYTCNEGFLLEGARSRVCLANGSWSGATPDCVPVRCATPPQLANGVTEGLDYGFMKEVTFHCHEGYILHGAPKLTCQSDGNWDAEIPLCKPVNCGPPEDLAHGFPNGFSFIHGGHIQYQCFPGYKLHGNSSRRCLSNGSWSGSSPSCLPCRCSTPVIEYGTVNGTDFDCGKAARIQCFKGFKLLGLSEITCEADGQWSSGFPHCEHTSCGSLPMIPNAFISETSSWKENVITYSCRSGYVIQGSSDLICTEKGVWSQPYPVCEPLSCGSPPSVANAVATGEAHTYESEVKLRCLEGYTMDTDTDTFTCQKDGRWFPERISCSPKKCPLPENITHILVHGDDFSVNRQVSVSCAEGYTFEGVNISVCQLDGTWEPPFSDESCSPVSCGKPESPEHGFVVGSKYTFESTIIYQCEPGYELENLAVNPSGPGLFLVDRTLSCRSELARGPIQTLFAWVSAAEGAEQRILVNRKCCCLIIPLEVLSQRNTRPCEVSVRPYWGGNRERVCQENRQWSGGVAICKETRCETPLEFLNGKADIENRTTGPNVVYSCNRGYSLEGPSEAHCTENGTWSHPVPLCKPNPCPVPFVIPENALLSEKEFYVDQNVSIKCREGFLLQGHGIITCNPDETWTQTSAKCERRYTQQPKSLNFQLAAYCSIRMFILRGGVQDGQLETAVAGASHREEQKQKREKARWYNGPPGSHMGQAELPPPAKGGGPPCGNFSNSSQGFMNRPLISLRWSPWGSMWPWSPQISRLSPSPAGSEESRQAGLVGFPTAQFTCSAKGQLERFVKRVPDPMPPDWDETPPQQGSRMRPPHNRGHQTPYTRVFLLASGQCPSGTELPEERAGSHLCCSAASAGKAQNWAEARIDELKEVGFRKWVIMKFAELKEHVLNQCKDAKNQDKTLQDPLTRITSLERNVNDLMELKNTTRELHNATTKQGQHSSSGNPENPSKILHEKINPKTHNPQVLQEISCGPPAHVENAIARGVHYQYGDMITYSCYSGYMLEGFLRSVCLENGTWTSPPICRAVCRFPCQNGGICQRPNACSCPEGWMGRLCEEPICILPCLNGGRCVAPYQCDCPPGWTGSRCHTGRPLSWFVFLVAQAHETPEDIEECDLDSEVVAK

SEQ ID NO: 193 - DNA, 11152 bp, Homo sapiens
  CDS (77)..(10780)
caattggtctagggtctcccccattggaatatccatcagtgatgagaaatacaacgtttgttgagttttctctagcatgagaagaatttgcgcggcttgctggggtctggcgctcgtttcgggctgggcgacctttcagcagatgtccccgtcgcgcaatttcagcttccgcctcttccccgagaccgcgcccggggcccccgggagtatccccgcgccgcccgctcctggcgacgaagcggcggggagcagagtggagcggctgggccaggcgttccgcgtgcggctgctgcgggagctcagcgagcgcctggagcttgtcttcctggtggatgattcgtccagcgtgggcgaagtcaacttccgcagcgagctcatgttcgtccgcaagctgctgtccgacttccccgtggtgcccacggccacgcgcgtggccatcgtgaccttctcgtccaagaactacgtggtgccgcgcgtcgattacatctccacccgccgcgcgcgccagcacaagtgcgcgctgctcctccaagagatccctgccatctcctaccgaggtggcggcacctacaccaagggcgccttccagcaagccgcgcaaattcttcttcatgctagagaaaactcaacaaaagttgtatttctcatcactgatggatattccaatgggggagaccctagaccaattgcagcgtcactgcgagattcaggagtggagatcttcacttttggcatatggcaagggaacattcgagagctgaatgacatggcttccaccccaaaggaggagcactgttacctgctacacagttttgaagaatttgaggctttagctcgccgggcattgcatgaagatctaccttctgggagttttattcaagatgatatggtccactgctcatatctttgtgatgagggcaaggactgctgtgaccgaatgggaagctgcaaatgtgggacacacacaggccattttgagtgcatctgtgaaaaggggtattacgggaaaggtctgcagtatgaatgcacagcttgcccatcggggacatacaaacctgaagcctcaccaggaggaatcagcagttgcattccatgtcccgatgaaaatcacacctctccacctggaagcacatcccctgaagactgtgtctgcagagagggatacagggcatctggccagacctgtgaacttgtccactgccctgccctgaagcctcccgaaaatggttactttatccaaaacacttgcaacaaccacttcaatgcagcctgtggggtccgatgtcaccctggatttgatcttgtgggaagcagcatcatcttatgtctacccaatggtttgtggtccggttcagagagctactgcagagtaagaacatgtcctcatctccgccagccgaaacatggccacatcagctgttctacaagggaaatgttatataagacaacatgtttggttgcctgtgatgaagggtacagactagaaggcagtgataagcttacttgtcaaggaaacagccagtgggatgggccagaaccccggtgtgtggagcgccactgttccacctttcagatgcccaaagatgtcatcatatccccccacaactgtggcaagcagccagccaaatttgggacgatctgctatgtaagttgccgccaagggttcattttatctggagtcaaagaaatgctgagatgtaccacttctggaaaatggaatgtcggagttcaggcagctgtgtgtaaagacgtggaggctcctcaaatcaactgtcctaaggacatagaggctaagactctggaacagcaagattctgccaatgttacctggcagattccaacagctaaagacaactctggtgaaaaggtgtcagtccgcgttcatccagctttcaccccaccttaccttttcccaattggagatgttgctatcgtatacacggcaactgacctatccggcaaccaggccagctgcattttccatatcaaggttattgatgcagaaccacctgtcatagactggtgcagatctccacctcccgtccaggtctcggagaaggtacatgccgcaagctgggatgagcctcagttctcagacaactcaggggctgaattggtcattaccagaagtcatacacaaggagaccttttccctcaaggggagactatagtacagtatacagccactgacccctcaggtaataacaggatatgtgatatccatattgtcatgaaaggttctccctgtgaaattccattcacacctgtaaatggggattttatatgcactccagataatactggagtcaactgtacattaacttgcttggagggctacgatttcacagaagggtctactgacaagtattattgtgcttatgaagatggcgtctggaaaccaacatataccactgaatggccagactgtgccaaaaaacgttttgcaaaccacgggttcaagtcctttgagatgttctacaaagcagctcgttgtgatgactcagatctgatgaagaagttttctgaagcatttgagacgaccctgggaaaaatggtcccatcattttgtagtgatgcagaggacattgactgcagactggaggagaacctgaccaaaaaatattgcctagaatataattatgactatgaaaatggctttgcaattggtccaggtggctggggtgcagctaataggctggattactcttacgatgacttcctggacactgtgcaagaaacagccacaagcatcggcaatgccaagtcctcacggattaaaagaagtgccccattatctgactataaaattaagttaatttttaacatcacagctagtgtgccattacccgatgaaagaaatgatacccttgaatgggaaaatcagcaacgactccttcagacattggaaactatcacaaataaactgaaaaggactctcaacaaagaccccatgtattcctttcagcttgcatcagaaatacttatagccgacagcaattcattagaaacaaaaaaggcttcccccttctgcagaccaggctcagtgctgagagggcgtatgtgtgtcaattgccctttgggaacctattataatctggaacatttcacctgtgaaagctgccggatcggatcctatcaagatgaagaagggcaacttgagtgcaagctttgcccctctgggatgtacacggaatatatccattcaagaaacatctctgattgtaaagctcagtgtaaacaaggcacctactcatacagtggacttgagacttgtgaatcgtgtccactgggcacttatcagccaaaatttggttcccggagctgcctctcgtgtccagaaaacacctcaactgtgaaaagaggagccgtgaacatttctgcatgtggagttccttgtccagaaggaaaattctcgcgttctgggttaatgccctgtcacccatgtcctcgtgactattaccaacctaatgcagggaaggccttctgcctggcctgtcccttttatggaactaccccattcgctggttccagatccatcacagaatgttcaagttttagttcaactttctcagcggcagaggaaagtgtggtgccccctgcctctcttggacatattaaaaagaggcatgaaatcagcagtcaggcaagtcatgaatgcttctttaacccttgccacaatagtggaacctgccagcaacttgggcgtggttatgtttgtctctgtccacttggatatacaggtttaaagtgtgaaacagacatcgatgagtgcagcccactgccttgcctcaacaatggagtttgtaaagacctagttggggaattcatttgtgagtgcccatcaggttacacaggtaagcactgtgaattgaacatcaatgaatgtcagtctaatccatgtagaaatcaggccacctgtgtggatgaattaaattcatacagttgtaaatgtcagccaggattttcaggcaaaaggtgtgaaacaggtatgtatcaactcagtgttattaataaccttaataatgcagtctgtgaagaccaggttgggggattcttgtgcaaatgcccacctggatttttgggtacccgatgtggaaagaacgtcgatgagtgtctcagtcagccatgcaaaaatggagctacctgtaaagacggtgccaatagcttcaggtgcctgtgtgcagctggcttcacaggatcacactgtgaattgaacatcaatgaatgtcagtctaatccatgtagaaatcaggccacctgtgtggatgaattaaattcatacagttgtaaatgtcagccaggattttcaggcaaaaggtgtgaaacagaacagtctacaggctttaacctggattttgaagtttctggcatctatggatatgtcatgctagatggcatgctcccatctctccatgctctaacctgtaccttctggatgaaatcctctgacgacatgaactatggaacaccaatctcctatgcagttgataacggcagcgacaataccttgctcctgactgattataacgggtgggttctttatgtgaatggcagggaaaagataacaaactgtccctcggtgaatgatggcagatggcatcatattgcaatcacttggacaagtactggtggagcctggagggtctatataaatggggaattatctgacggtggtactggcctctccattggcaaagccatacctggtggcggtgcattagttcttgggcaagagcaagacaaaaaaggagaggggttcaacccggctgagtcttttgtgggctccataagccagctcaacctctgggactatgtcctgtctccacagcaggtgaagtcactggctacctcctgcccagaggaactcagtaaaggaaacgtgttagcatggcctgatttcttgtcaggaattgtggggaaagtgaagatcgattctaagagcatattttgttctgattgcccacgcttgggagggtcagtgcctcatctgagaactgcatctgaagatttaaaaccaggttccaaagtcaatctgttctgtgaaccaggcttccagctggtcgggaaccctgtgcagtactgtctgaatcaaggacagtggacacaaccactcccccactgtgaacgcattcgctgtggggtgccacctcctttggagaatggcttccattcagccgatgacttctatgctggcagcacagtaacctaccagtgcaacaatggctactatctattgggtgactcaaggatgttctgtacagataatgggagctggaacggcgtttcaccatcctgcttagatgtcgatgagtgtgcagttggatcagattgtagtgagcatgcttcttgcctgaacgtagatggatcctacatatgttcatgtgtcccaccgtacacaggagatgggaaaaactgtgcagaacctataaaatgtaaggctccaggaaatccggaaaatggccactcctcaggtgagatttatacagtaggtgccgaagtcacattttcgtgtcaggaaggataccagttgatgggagtaaccaaaatcacatgtttggagtctggagaatggaatcatctaataccatattgtaaagctgtttcatgtggtaaaccggctattccagaaaatggttgcattgaggagttagcatttacttttggcagcaaagtgacatataggtgtaataaaggatatactctggccggtgataaagaatcatcctgtcttgctaacagttcttggagtcattcccctcctgtgtgtgaaccagtgaagtgttctagtccggaaaatataaataatggaaaatatattttgagtgggcttacctacctttctactgcatcatattcatgcgatacaggatacagcttacagggcccttccattattgaatgcacggcttctggcatctgggacagagcgccacctgcctgtcacctcgtcttctgtggagaaccacctgccatcaaagatgctgtcattacggggaataacttcactttcaggaacaccgtcacttacacttgcaaagaaggctatactcttgctggtcttgacaccattgaatgcctggccgacggcaagtggagtagaagtgaccagcagtgcctggctgtctcctgtgatgagccacccattgtggaccacgcctctccagagactgcccatcggctctttggagacattgcattctactactgctctgatggttacagcctagcagacaattcccagcttctctgcaatgcccagggcaagtgggtacccccagaaggtcaagacatgccccgttgtatagctcatttctgtgaaaaacctccatcggtttcctatagcatcttggaatctgtgagcaaagcaaaatttgcagctggctcagttgtgagctttaaatgcatggaaggctttgtactgaacacctcagcaaagattgaatgtatgagaggtgggcagtggaacccttcccccatgtccatccagtgcatccctgtgcggtgtggagagccaccaagcatcatgaatggctatgcaagtggatcaaactacagttttggagccatggtggcttacagctgcaacaaggggttctacatcaaaggggaaaagaagagcacctgcgaagccacagggcagtggagtagtcctataccgacgtgccacccggtatcttgtggtgaaccacctaaggttgagaatggctttctggagcatacaactggcaggatctttgagagtgaagtgaggtatcagtgtaacccgggctataagtcagtcggaagtcctgtatttgtctgccaagccaatcgccactggcacagtgaatcccctctgatgtgtgttcctctcgactgtggaaaacctcccccgatccagaatggcttcatgaaaggagaaaactttgaagtagggtccaaggttcagtttttctgtaatgagggttatgagcttgttggtgacagttcttggacatgtcagaaatctggcaaatggaataagaagtcaaatccaaagtgcatgcctgccaagtgcccagagccgcccctcttggaaaaccagctagtattaaaggagttgaccaccgaggtaggagttgtgacattttcctgtaaagaagggcatgtcctgcaaggcccctctgtcctgaaatgcttgccatcccagcaatggaatgactctttccctgtttgtaagattgttctttgtaccccacctcccctaatttcctttggtgtccccattccttcttctgctcttcattttggaagtactgtcaagtattcttgtgtaggtgggtttttcctaagaggaaattctaccaccctctgccaacctgatggcacctggagctctccactgccagaatgtgttccagtagaatgtccccaacctgaggaaatccccaatggaatcattgatgtgcaaggccttgcctatctcagcacagctctctatacctgcaagccaggctttgaattggtgggaaatactaccaccctttgtggagaaaatggtcactggcttggaggaaaaccaacatgtaaagccattgagtgcctgaaacccaaggagattttgaatggcaaattctcttacacggacctacactatggacagaccgttacctactcttgcaaccgaggctttcggctcgaaggtcccagtgccttgacctgtttagagacaggtgattgggatgtagatgccccatcttgcaatgccatccactgtgattccccacaacccattgaaaatggttttgtagaaggtgcagattacagctatggtgccataatcatctacagttgcttccctgggtttcaggtggctggtcatgccatgcagacctgtgaagagtcaggatggtcaagttccatcccaacatgtatgccaatagactgtggcctccctcctcatatagattttggagactgtactaaactcaaagatgaccagggatattttgagcaagaagacgacatgatggaagttccatatgtgactcctcaccctccttatcatttgggagcagtggctaaaacctgggaaaatacaaaggagtctcctgctacacattcatcaaactttctgtatggtaccatggtttcatacacctgtaatccaggatatgaacttctggggaaccctgtgctgatctgccaggaagatggaacttggaatggcagtgcaccatcctgcatttcaattgaatgtgacttgcctactgctcctgaaaatggctttttgcgttttacagagactagcatgggaagtgctgtgcagtatagctgtaaacctggacacattctagcaggctctgacttaaggctttgtctagagaatagaaagtggagtggtgcctccccacgctgtgaagccatttcatgcaaaaagccaaatccagtcatgaatggatccatcaaaggaagcaactacacatacctgagcacgttgtactatgagtgtgaccccggatatgtgctgaatggcactgagaggagaacatgccaggatgacaaaaactgggatgaggatgagcccatttgcattcctgtggactgcagttcacccccagtctcagccaatggccaggtgagaggagacgagtacacattccaaaaagagattgaatacacttgcaatgaagggttcttgcttgagggagccaggagtcgggtttgtcttgccaatggaagttggagtggagccactcccgactgtgtgcctgtcagatgtgccaccccgccacaactggccaatggggtgacggaaggcctggactatggcttcatgaaggaagtaacattccactgtcacgagggctacatcttgcacggtgctccaaaactcacctgtcagtcagatggcaactgggatgcagagattcctctctgtaaaccagtcaactgtggacctcctgaagatcttgcccatggtttccctaatggtttttcctttattcatgggggccatatacagtatcagtgctttcctggttataagctccatggaaattcatcaagaaggtgcctctccaatggctcctggagtggcagctcaccttcctgcctgccttgcagatgttccacaccagtaattgaatatggaactgtcaatgggacagattttgactgtggaaaggcagcccggattcagtgcttcaaaggcttcaagctcctaggactttctgaaatcacctgtgaagccgatggccagtggagctctgggttcccccactgtgaacacacttcttgtggttctcttccaatgataccaaatgcgttcatcagtgagaccagctcttggaaggaaaatgtgataacttacagctgcaggtctggatatgtcatacaaggcagttcagatctgatttgtacagagaaaggggtatggagccagccttatccagtctgtgagcccttgtcctgtgggtccccaccgtctgtcgccaatgcagtggcaactggagaggcacacacctatgaaagtgaagtgaaactcagatgtctggaaggttatacgatggatacagatacagatacattcacctgtcagaaagatggtcgctggttccctgagagaatctcctgcagtcctaaaaaatgtcctctcccggaaaacataacacatatacttgtacatggggacgatttcagtgtgaataggcaagtttctgtgtcatgtgcagaagggtatacctttgagggagttaacatatcagtatgtcagcttgatggaacctgggagccaccattctccgatgaatcttgcagtccagtttcttgtgggaaacctgaaagtccagaacatggatttgtggttggcagtaaatacacctttgaaagcacaattatttatcagtgtgagcctggctatgaactagaggggaacagggaacgtgtctgccaggagaacagacagtggagtggaggggtggcaatatgcaaagagaccaggtgtgaaactccacttgaatttctcaatgggaaagctgacattgaaaacaggacgactggacccaacgtggtatattcctgcaacagaggctacagtcttgaagggccatctgaggcacactgcacagaaaatggaacctggagccacccagtccctctctgcaaaccaaatccatgccctgttccttttgtgattcccgagaatgctctgctgtctgaaaaggagttttatgttgatcagaatgtgtccatcaaatgtagggaaggttttctgctgcagggccacggcatcattacctgcaaccccgacgagacgtggacacagacaagcgccaaatgtgaaaaaatctcatgtggtccaccagctcacgtagaaaatgcaattgctcgaggcgtacattatcaatatggagacatgatcacctactcatgttacagtggatacatgttggagggtttcctgaggagtgtttgtttagaaaatggaacatggacatcacctcctatttgcagagctgtctgtcgatttccatgtcagaatgggggcatctgccaacgcccaaatgcttgttcctgtccagagggctggatggggcgcctctgtgaagaaccaatctgcattcttccctgtctgaacggaggtcgctgtgtggccccttaccagtgtgactgcccgcctggctggacggggtctcgctgtcatacagctgtttgccagtctccctgcttaaatggtggaaaatgtgtaagaccaaaccgatgtcactgtctttcttcttggacgggacataactgttccaggaaaaggaggactgggttttaaccactgcacgaccatctggctctcccaaaagcaggatcatctctcctcggtagtgcctgggcatcctggaacttatgcaaagaaagtccaacatggtgctgggtcttgtttagtaaacttgttacttggggttactttttttattttgtgatatattttgttattccttgtgacatactttcttacatgtttccatttttaaatatgcctgtattttctatataaaaattatattaaatagatgctgctctaccctcacaaaatgtacatattctgctgtctattgggaaagttcctggtacacatttttattcagttacttaaaatgatttttccattaaagtatattttgctactaaataaaaaaaa

SEQ ID NO: 194 - protein, 3568 aa, Homo sapiens
MRRICAACWGLALVSGWATFQQMSPSRNFSFRLFPETAPGAPGSIPAPPAPGDEAAGSRVERLGQAFRVRLLRELSERLELVFLVDDSSSVGEVNFRSELMFVRKLLSDFPVVPTATRVAIVTFSSKNYVVPRVDYISTRRARQHKCALLLQEIPAISYRGGGTYTKGAFQQAAQILLHARENSTKVVFLITDGYSNGGDPRPIAASLRDSGVEIFTFGIWQGNIRELNDMASTPKEEHCYLLHSFEEFEALARRALHEDLPSGSFIQDDMVHCSYLCDEGKDCCDRMGSCKCGTHTGHFECICEKGYYGKGLQYECTACPSGTYKPEASPGGISSCIPCPDENHTSPPGSTSPEDCVCREGYRASGQTCELVHCPALKPPENGYFIQNTCNNHFNAACGVRCHPGFDLVGSSIILCLPNGLWSGSESYCRVRTCPHLRQPKHGHISCSTREMLYKTTCLVACDEGYRLEGSDKLTCQGNSQWDGPEPRCVERHCSTFQMPKDVIISPHNCGKQPAKFGTICYVSCRQGFILSGVKEMLRCTTSGKWNVGVQAAVCKDVEAPQINCPKDIEAKTLEQQDSANVTWQIPTAKDNSGEKVSVRVHPAFTPPYLFPIGDVAIVYTATDLSGNQASCIFHIKVIDAEPPVIDWCRSPPPVQVSEKVHAASWDEPQFSDNSGAELVITRSHTQGDLFPQGETIVQYTATDPSGNNRICDIHIVMKGSPCEIPFTPVNGDFICTPDNTGVNCTLTCLEGYDFTEGSTDKYYCAYEDGVWKPTYTTEWPDCAKKRFANHGFKSFEMFYKAARCDDSDLMKKFSEAFETTLGKMVPSFCSDAEDIDCRLEENLTKKYCLEYNYDYENGFAIGPGGWGAANRLDYSYDDFLDTVQETATSIGNAKSSRIKRSAPLSDYKIKLIFNITASVPLPDERNDTLEWENQQRLLQTLETITNKLKRTLNKDPMYSFQLASEILIADSNSLETKKASPFCRPGSVLRGRMCVNCPLGTYYNLEHFTCESCRIGSYQDEEGQLECKLCPSGMYTEYIHSRNISDCKAQCKQGTYSYSGLETCESCPLGTYQPKFGSRSCLSCPENTSTVKRGAVNISACGVPCPEGKFSRSGLMPCHPCPRDYYQPNAGKAFCLACPFYGTTPFAGSRSITECSSFSSTFSAAEESVVPPASLGHIKKRHEISSQASHECFFNPCHNSGTCQQLGRGYVCLCPLGYTGLKCETDIDECSPLPCLNNGVCKDLVGEFICECPSGYTGKHCELNINECQSNPCRNQATCVDELNSYSCKCQPGFSGKRCETGMYQLSVINNLNNAVCEDQVGGFLCKCPPGFLGTRCGKNVDECLSQPCKNGATCKDGANSFRCLCAAGFTGSHCELNINECQSNPCRNQATCVDELNSYSCKCQPGFSGKRCETEQSTGFNLDFEVSGIYGYVMLDGMLPSLHALTCTFWMKSSDDMNYGTPISYAVDNGSDNTLLLTDYNGWVLYVNGREKITNCPSVNDGRWHHIAITWTSTGGAWRVYINGELSDGGTGLSIGKAIPGGGALVLGQEQDKKGEGFNPAESFVGSISQLNLWDYVLSPQQVKSLATSCPEELSKGNVLAWPDFLSGIVGKVKIDSKSIFCSDCPRLGGSVPHLRTASEDLKPGSKVNLFCEPGFQLVGNPVQYCLNQGQWTQPLPHCERIRCGVPPPLENGFHSADDFYAGSTVTYQCNNGYYLLGDSRMFCTDNGSWNGVSPSCLDVDECAVGSDCSEHASCLNVDGSYICSCVPPYTGDGKNCAEPIKCKAPGNPENGHSSGEIYTVGAEVTFSCQEGYQLMGVTKITCLESGEWNHLIPYCKAVSCGKPAIPENGCIEELAFTFGSKVTYRCNKGYTLAGDKESSCLANSSWSHSPPVCEPVKCSSPENINNGKYILSGLTYLSTASYSCDTGYSLQGPSIIECTASGIWDRAPPACHLVFCGEPPAIKDAVITGNNFTFRNTVTYTCKEGYTLAGLDTIECLADGKWSRSDQQCLAVSCDEPPIVDHASPETAHRLFGDIAFYYCSDGYSLADNSQLLCNAQGKWVPPEGQDMPRCIAHFCEKPPSVSYSILESVSKAKFAAGSVVSFKCMEGFVLNTSAKIECMRGGQWNPSPMSIQCIPVRCGEPPSIMNGYASGSNYSFGAMVAYSCNKGFYIKGEKKSTCEATGQWSSPIPTCHPVSCGEPPKVENGFLEHTTGRIFESEVRYQCNPGYKSVGSPVFVCQANRHWHSESPLMCVPLDCGKPPPIQNGFMKGENFEVGSKVQFFCNEGYELVGDSSWTCQKSGKWNKKSNPKCMPAKCPEPPLLENQLVLKELTTEVGVVTFSCKEGHVLQGPSVLKCLPSQQWNDSFPVCKIVLCTPPPLISFGVPIPSSALHFGSTVKYSCVGGFFLRGNSTTLCQPDGTWSSPLPECVPVECPQPEEIPNGIIDVQGLAYLSTALYTCKPGFELVGNTTTLCGENGHWLGGKPTCKAIECLKPKEILNGKFSYTDLHYGQTVTYSCNRGFRLEGPSALTCLETGDWDVDAPSCNAIHCDSPQPIENGFVEGADYSYGAIIIYSCFPGFQVAGHAMQTCEESGWSSSIPTCMPIDCGLPPHIDFGDCTKLKDDQGYFEQEDDMMEVPYVTPHPPYHLGAVAKTWENTKESPATHSSNFLYGTMVSYTCNPGYELLGNPVLICQEDGTWNGSAPSCISIECDLPTAPENGFLRFTETSMGSAVQYSCKPGHILAGSDLRLCLENRKWSGASPRCEAISCKKPNPVMNGSIKGSNYTYLSTLYYECDPGYVLNGTERRTCQDDKNWDEDEPICIPVDCSSPPVSANGQVRGDEYTFQKEIEYTCNEGFLLEGARSRVCLANGSWSGATPDCVPVRCATPPQLANGVTEGLDYGFMKEVTFHCHEGYILHGAPKLTCQSDGNWDAEIPLCKPVNCGPPEDLAHGFPNGFSFIHGGHIQYQCFPGYKLHGNSSRRCLSNGSWSGSSPSCLPCRCSTPVIEYGTVNGTDFDCGKAARIQCFKGFKLLGLSEITCEADGQWSSGFPHCEHTSCGSLPMIPNAFISETSSWKENVITYSCRSGYVIQGSSDLICTEKGVWSQPYPVCEPLSCGSPPSVANAVATGEAHTYESEVKLRCLEGYTMDTDTDTFTCQKDGRWFPERISCSPKKCPLPENITHILVHGDDFSVNRQVSVSCAEGYTFEGVNISVCQLDGTWEPPFSDESCSPVSCGKPESPEHGFVVGSKYTFESTIIYQCEPGYELEGNRERVCQENRQWSGGVAICKETRCETPLEFLNGKADIENRTTGPNVVYSCNRGYSLEGPSEAHCTENGTWSHPVPLCKPNPCPVPFVIPENALLSEKEFYVDQNVSIKCREGFLLQGHGIITCNPDETWTQTSAKCEKISCGPPAHVENAIARGVHYQYGDMITYSCYSGYMLEGFLRSVCLENGTWTSPPICRAVCRFPCQNGGICQRPNACSCPEGWMGRLCEEPICILPCLNGGRCVAPYQCDCPPGWTGSRCHTAVCQSPCLNGGKCVRPNRCHCLSSWTGHNCSRKRRTGF

SEQ ID NO: 195 - DNA, 11158 bp, Homo sapiens
  CDS (77)..(10786)
caattggtctagggtctcccccattggaatatccatcagtgatgagaaatacaacgtttgttgagttttctctagcatgagaagaatttgcgcggcttgctggggtctggcgctcgtttcgggctgggcgacctttcagcagatgtccccgtcgcgcaatttcagcttccgcctcttccccgagaccgcgcccggggcccccgggagtatccccgcgccgcccgctcctggcgacgaagcggcggggagcagagtggagcggctgggccaggcgttccgcgtgcggctgctgcgggagctcagcgagcgcctggagcttgtcttcctggtggatgattcgtccagcgtgggcgaagtcaacttccgcagcgagctcatgttcgtccgcaagctgctgtccgacttccccgtggtgcccacggccacgcgcgtggccatcgtgaccttctcgtccaagaactacgtggtgccgcgcgtcgattacatctccacccgccgcgcgcgccagcacaagtgcgcgctgctcctccaagagatccctgccatctcctaccgaggtggcggcacctacaccaagggcgccttccagcaagccgcgcaaattcttcttcatgctagagaaaactcaacaaaagttgtatttctcatcactgatggatattccaatgggggagaccctagaccaattgcagcgtcactgcgagattcaggagtggagatcttcacttttggcatatggcaagggaacattcgagagctgaatgacatggcttccaccccaaaggaggagcactgttacctgctacacagttttgaagaatttgaggctttagtcgccctctgtcatatgttatttgtagatctaccttctgggagttttattcaagatgatatggtccactgctcatatctttgtgatgaaggcaaggactgctgtgaccgaatgggaagctgcaaatgtgggaaacacacaggccattttgagtgcatctgtgaaaaggggtataacgggaaaggtctgcagtatgactgcacagtttgcccatcggggacatacaaacctgaagcctcaccaggaggaatcagcagttgcattccatgtcctgatgaaaatcacacctctccacctggaagcacatcccctgaagactgtgtctgcagagagggatacagggcatctggccagacctgtgaagttgtccactgccctgccctgaagcctcccgaaaatggttactttatccaaaacacttgcaacaaccacttcaatgcagcctgtggggtccgatgtcaccctggatttgatcttgtgggaagcagcatcatcttatgtctacccaatggtttgtggtccggttcagagagctactgcagagtaagaacatgtcctcatctccgccagccgaaacatggccacatcagctgttctacaagggaaatgttatataagacaacatgtttggttgcctgtgatgaagggtacaggctagaaggcagtgataagcttacttgtcaaggaaacagccagtgggatgggccagaaccccggtgtgtggagcgccactgttccacctttcagatgcccaaagatgtcatcatatccccccacaactgtggcaagcagccagccaaatttgggacgatctgctatgtaagttgccgccaagggttcattttatctggagtcaaagaaatgctgagatgtaccacttctggaaaatggaatgtcggagttcaggcagctgtgtgtaaagacgtggaggctcctcaaatcaactgtcctaaggacatagaggctaagactctggaacagcaagattctgccaatgttacctggcagattccaacagctaaagacaactctggtgaaaaggtgtcagtccacgttcatccagctttcaccccaccttaccttttcccaattggagatgttgctatcgtatacacggcaactgacctatccggcaaccaggccagctgcattttccatatcaaggttattgatgcagaaccacctgtcatagactggtgcagatctccacctcccgtccaggtctcggagaaggtacatgccgcaagctgggatgagcctcagttctcagacaactcaggtgctgaattggtcattaccagaagtcatacacaaggagaccttttccctcaaggggagactatagtacagtatacagccactgacccctcaggcaataacaggacatgtgatatccatattgtcataaaaggttctccctgtgaaattccattcacacctgtaaatggggattttatatgcactccagataatactggagtcaactgtacattaacttgcttggagggctatgatttcacagaagggtctactgacaagtattattgtgcttatgaagatggcgtctggaaaccaacatataccactgaatggccagactgtgccagtaagcgttttgcaaaccacgggttcaagtcctttgagatgttctacaaagcagctcgttgtgatgacacagatctgatgaagaagttttctgaagcatttgagacgaccctgggaaaaatggtcccatcattttgtagtgatgcagaggacattgactgcagactggaggagaacctgaccaaaaaatattgcctagaatataattatgactatgaaaatggctttgcaattggtccaggtggctggggtgcagctaataggctggattactcttacgatgacttcctggacactgtgcaagaaacagccacaagcatcggcaatgccaagtcctcacggattaaaagaagtgccccattatctgactataaaattaagttaatttttaacatcacagctagtgtgccattacccgatgaaagaaatgatacccttgaatgggaaaatcagcaacgactccttcagacattggaaactatcacaaataaactgaaaaggactctcaacaaagaccccatgtattcctttcagcttgcatcagaaatacttatagccgacagcaattcattagaaacaaaaaaggcttcccccttctgcagaccaggctcagtgctgagagggcgtatgtgtgtcaattgccctttgggaacctattataatctggaacatttcacctgtgaaagctgccggatcggatcctatcaagatgaagaagggcaacttgagtgcaagctttgcccctctgggatgtacacggaatatatccattcaagaaacatctctgattgtaaagctcagtgtaaacaaggcacctactcatacagtggacttgagacttgtgaatcgtgtccactgggcacttatcagccaaaatttggttcccggagctgcctctcgtgtccagaaaacacctcaactgtgaaaagaggagccgtgaacatttctgcatgtggagttccttgtccagaaggaaaattctcgcgttctgggttaatgccctgtcacccatgtcctcgtgactattaccaacctaatgcagggaaggccttctgcctggcctgtcccttttatggaactaccccattcgctggttccagatccatcacagaatgttcaagttttagttcaactttctcagcggcagaggaaagtgtggtgccccctgcctctcttggacatattaaaaagaggcatgaaatcagcagtcaggcaagtcatgaatgcttctttaacccttgccacaatagtggaacctgccagcaacttgggcgtggttatgtttgtctctgtccacttggatatacaggtttaaagtgtgaaacagacatcgatgagtgcagcccactgccttgcctcaacaatggagtttgtaaagacctagttggggaattcatttgtgagtgcccatcaggttacacaggtaagcactgtgaattgaacatcaatgaatgtcagtctaatccatgtagaaatcaggccacctgtgtggatgaattaaattcatacagttgtaaatgtcagccaggattttcaggcaaaaggtgtgaaacaggtatgtatcaactcagtgttattaataaccttaataatgcagtctgtgaagaccaggttgggggattcttgtgcaaatgcccacctggatttttgggtacccgatgtggaaagaacgtcgatgagtgtctcagtcagccatgcaaaaatggagctacctgtaaagacggtgccaatagcttcaggtgcctgtgtgcagctggcttcacaggatcacactgtgaattgaacatcaatgaatgtcagtctaatccatgtagaaatcaggccacctgtgtggatgaattaaattcatacagttgtaaatgtcagccaggattttcaggcaaaaggtgtgaaacagaacagtctacaggctttaacctggattttgaagtttctggcatctatggatatgtcatgctagatggcatgctcccatctctccatgctctaacctgtaccttctggatgaaatcctctgacgacatgaactatggaacaccaatctcctatgcagttgataacggcagcgacaataccttgctcctgactgattataacgggtgggttctttatgtgaatggcagggaaaagataacaaactgtccctcggtgaatgatggcagatggcatcatattgcaatcacttggacaagtactggtggagcctggagggtctatataaatggggaattatctgacggtggtactggcctctccattggcaaagccatacctggtggcggtgcattagttcttgggcaagagcaagacaaaaaaggagaggggttcaacccggctgagtcttttgtgggctccataagccagctcaacctctgggactatgtcctgtctccacagcaggtgaagtcactggctacctcctgcccagaggaactcagtaaaggaaacgtgttagcatggcctgatttcttgtcaggaattgtggggaaagtgaagatcgattctaagagcatattttgttctgattgcccacgcttgggagggtcagtgcctcatctgagaactgcatctgaagatttaaaaccaggttccaaagtcaatctgttctgtgaaccaggcttccagctggtcgggaaccctgtgcagtactgtctgaatcaaggacagtggacacaaccactcccccactgtgaacgcattcgctgtggggtgccacctcctttggagaatggcttccattcagccgatgacttctatgctggcagcacagtaacctaccagtgcaacaatggctactatctattgggtgactcaaggatgttctgtacagataatgggagctggaacggcgtttcaccatcctgcttagatgtcgatgagtgtgcagttggatcagattgtagtgagcatgcttcttgcctgaacgtagatggatcctacatatgttcatgtgtcccaccgtacacaggagatgggaaaaactgtgcagaacctataaaatgtaaggctccaggaaatccggaaaatggccactcctcaggtgagatttatacagtaggtgccgaagtcacattttcgtgtcaggaaggataccagttgatgggagtaaccaaaatcacatgtttggagtctggagaatggaatcatctaataccatattgtaaagctgtttcatgtggtaaaccggctattccagaaaatggttgcattgaggagttagcatttacttttggcagcaaagtgacatataggtgtaataaaggatatactctggccggtgataaagaatcatcctgtcttgctaacagttcttggagtcattcccctcctgtgtgtgaaccagtgaagtgttctagtccggaaaatataaataatggaaaatatattttgagtgggcttacctacctttctactgcatcatattcatgcgatacaggatacagcttacagggcccttccattattgaatgcacggcttctggcatctgggacagagcgccacctgcctgtcacctcgtcttctgtggagaaccacctgccatcaaagatgctgtcattacggggaataacttcactttcaggaacaccgtcacttacacttgcaaagaaggctatactcttgctggtcttgacaccattgaatgcctggccgacggcaagtggagtagaagtgaccagcagtgcctggctgtctcctgtgatgagccacccattgtggaccacgcctctccagagactgcccatcggctctttggagacattgcattctactactgctctgatggttacagcctagcagacaattcccagcttctctgcaatgcccagggcaagtgggtacccccagaaggtcaagacatgccccgttgtatagctcatttctgtgaaaaacctccatcggtttcctatagcatcttggaatctgtgagcaaagcaaaatttgcagctggctcagttgtgagctttaaatgcatggaaggctttgtactgaacacctcagcaaagattgaatgtatgagaggtgggcagtggaacccttcccccatgtccatccagtgcatccctgtgcggtgtggagagccaccaagcatcatgaatggctatgcaagtggatcaaactacagttttggagccatggtggcttacagctgcaacaaggggttctacatcaaaggggaaaagaagagcacctgcgaagccacagggcagtggagtagtcctataccgacgtgccacccggtatcttgtggtgaaccacctaaggttgagaatggctttctggagcatacaactggcaggatctttgagagtgaagtgaggtatcagtgtaacccgggctataagtcagtcggaagtcctgtatttgtctgccaagccaatcgccactggcacagtgaatcccctctgatgtgtgttcctctcgactgtggaaaacctcccccgatccagaatggcttcatgaaaggagaaaactttgaagtagggtccaaggttcagtttttctgtaatgagggttatgagcttgttggtgacagttcttggacatgtcagaaatctggcaaatggaataagaagtcaaatccaaagtgcatgcctgccaagtgcccagagccgcccctcttggaaaaccagctagtattaaaggagttgaccaccgaggtaggagttgtgacattttcctgtaaagaagggcatgtcctgcaaggcccctctgtcctgaaatgcttgccatcccagcaatggaatgactctttccctgtttgtaagattgttctttgtaccccacctcccctaatttcctttggtgtccccattccttcttctgctcttcattttggaagtactgtcaagtattcttgtgtaggtgggtttttcctaagaggaaattctaccaccctctgccaacctgatggcacctggagctctccactgccagaatgtgttccagtagaatgtccccaacctgaggaaatccccaatggaatcattgatgtgcaaggccttgcctatctcagcacagctctctatacctgcaagccaggctttgaattggtgggaaatactaccaccctttgtggagaaaatggtcactggcttggaggaaaaccaacatgtaaagccattgagtgcctgaaacccaaggagattttgaatggcaaattctcttacacggacctacactatggacagaccgttacctactcttgcaaccgaggctttcggctcgaaggtcccagtgccttgacctgtttagagacaggtgattgggatgtagatgccccatcttgcaatgccatccactgtgattccccacaacccattgaaaatggttttgtagaaggtgcagattacagctatggtgccataatcatctacagttgcttccctgggtttcaggtggctggtcatgccatgcagacctgtgaagagtcaggatggtcaagttccatcccaacatgtatgccaatagactgtggcctccctcctcatatagattttggagactgtactaaactcaaagatgaccagggatattttgagcaagaagacgacatgatggaagttccatatgtgactcctcaccctccttatcatttgggagcagtggctaaaacctgggaaaatacaaaggagtctcctgctacacattcatcaaactttctgtatggtaccatggtttcatacacctgtaatccaggatatgaacttctggggaaccctgtgctgatctgccaggaagatggaacttggaatggcagtgcaccatcctgcatttcaattgaatgtgacttgcctactgctcctgaaaatggctttttgcgttttacagagactagcatgggaagtgctgtgcagtatagctgtaaacctggacacattctagcaggctctgacttaaggctttgtctagagaatagaaagtggagtggtgcctccccacgctgtgaagccatttcatgcaaaaagccaaatccagtcatgaatggatccatcaaaggaagcaactacacatacctgagcacgttgtactatgagtgtgaccccggatatgtgctgaatggcactgagaggagaacatgccaggatgacaaaaactgggatgaggatgagcccatttgcattcctgtggactgcagttcacccccagtctcagccaatggccaggtgagaggagacgagtacacattccaaaaagagattgaatacacttgcaatgaagggttcttgcttgagggagccaggagtcgggtttgtcttgccaatggaagttggagtggagccactcccgactgtgtgcctgtcagatgtgccaccccgccacaactggccaatggggtgacggaaggcctggactatggcttcatgaaggaagtaacattccactgtcacgagggctacatcttgcacggtgctccaaaactcacctgtcagtcagatggcaactgggatgcagagattcctctctgtaaaccagtcaactgtggacctcctgaagatcttgcccatggtttccctaatggtttttcctttattcatgggggccatatacagtatcagtgctttcctggttataagctccatggaaattcatcaagaaggtgcctctccaatggctcctggagtggcagctcaccttcctgcctgccttgcagatgttccacaccagtaattgaatatggaactgtcaatgggacagattttgactgtggaaaggcagcccggattcagtgcttcaaaggcttcaagctcctaggactttctgaaatcacctgtgaagccgatggccagtggagctctgggttcccccactgtgaacacacttcttgtggttctcttccaatgataccaaatgcgttcatcagtgagaccagctcttggaaggaaaatgtgataacttacagctgcaggtctggatatgtcatacaaggcagttcagatctgatttgtacagagaaaggggtatggagccagccttatccagtctgtgagcccttgtcctgtgggtccccaccgtctgtcgccaatgcagtggcaactggagaggcacacacctatgaaagtgaagtgaaactcagatgtctggaaggttatacgatggatacagatacagatacattcacctgtcagaaagatggtcgctggttccctgagagaatctcctgcagtcctaaaaaatgtcctctcccggaaaacataacacatatacttgtacatggggacgatttcagtgtgaataggcaagtttctgtgtcatgtgcagaagggtatacctttgagggagttaacatatcagtatgtcagcttgatggaacctgggagccaccattctccgatgaatcttgcagtccagtttcttgtgggaaacctgaaagtccagaacatggatttgtggttggcagtaaatacacctttgaaagcacaattatttatcagtgtgagcctggctatgaactagaggggaacagggaacgtgtctgccaggagaacagacagtggagtggaggggtggcaatatgcaaagagaccaggtgtgaaactccacttgaatttctcaatgggaaagctgacattgaaaacaggacgactggacccaacgtggtatattcctgcaacagaggctacagtcttgaagggccatctgaggcacactgcacagaaaatggaacctggagccacccagtccctctctgcaaaccaaatccatgccctgttccttttgtgattcccgagaatgctctgctgtctgaaaaggagttttatgttgatcagaatgtgtccatcaaatgtagggaaggttttctgctgcagggccacggcatcattacctgcaaccccgacgagacgtggacacagacaagcgccaaatgtgaaaaaatctcatgtggtccaccagctcacgtagaaaatgcaattgctcgaggcgtacattatcaatatggagacatgatcacctactcatgttacagtggatacatgttggagggtttcctgaggagtgtttgtttagaaaatggaacatggacatcacctcctatttgcagagctgtctgtcgatttccatgtcagaatgggggcatctgccaacgcccaaatgcttgttcctgtccagagggctggatggggcgcctctgtgaagaaccaatctgcattcttccctgtctgaacggaggtcgctgtgtggccccttaccagtgtgactgcccgcctggctggacggggtctcgctgtcatacagctgtttgccagtctccctgcttaaatggtggaaaatgtgtaagaccaaaccgatgtcactgtctttcttcttggacgggacataactgttccaggaaaaggaggactgggttttaaccactgcacgaccatctggctctcccaaaagcaggatcatctctcctcggtagtgcctgggcatcctggaacttatgcaaagaaagtccaacatggtgctgggtcttgtttagtaaacttgttacttggggttactttttttattttgtgatatattttgttattccttgtgacatactttcttacatgtttccatttttaaatatgcctgtattttctatataaaaattatattaaatagatgctgctctaccctcacaaaatgtacatattctgctgtctattgggaaagttcctggtacacatttttattcagttacttaaaatgatttttccattaaagtatattttgctactaaataaaaaaaa

SEQ ID NO: 196 - protein, 3570 aa, Homo sapiens
MRRICAACWGLALVSGWATFQQMSPSRNFSFRLFPETAPGAPGSIPAPPAPGDEAAGSRVERLGQAFRVRLLRELSERLELVFLVDDSSSVGEVNFRSELMFVRKLLSDFPVVPTATRVAIVTFSSKNYVVPRVDYISTRRARQHKCALLLQEIPAISYRGGGTYTKGAFQQAAQILLHARENSTKVVFLITDGYSNGGDPRPIAASLRDSGVEIFTFGIWQGNIRELNDMASTPKEEHCYLLHSFEEFEALVALCHMLFVDLPSGSFIQDDMVHCSYLCDEGKDCCDRMGSCKCGKHTGHFECICEKGYNGKGLQYDCTVCPSGTYKPEASPGGISSCIPCPDENHTSPPGSTSPEDCVCREGYRASGQTCEVVHCPALKPPENGYFIQNTCNNHFNAACGVRCHPGFDLVGSSIILCLPNGLWSGSESYCRVRTCPHLRQPKHGHISCSTREMLYKTTCLVACDEGYRLEGSDKLTCQGNSQWDGPEPRCVERHCSTFQMPKDVIISPHNCGKQPAKFGTICYVSCRQGFILSGVKEMLRCTTSGKWNVGVQAAVCKDVEAPQINCPKDIEAKTLEQQDSANVTWQIPTAKDNSGEKVSVHVHPAFTPPYLFPIGDVAIVYTATDLSGNQASCIFHIKVIDAEPPVIDWCRSPPPVQVSEKVHAASWDEPQFSDNSGAELVITRSHTQGDLFPQGETIVQYTATDPSGNNRTCDIHIVIKGSPCEIPFTPVNGDFICTPDNTGVNCTLTCLEGYDFTEGSTDKYYCAYEDGVWKPTYTTEWPDCASKRFANHGFKSFEMFYKAARCDDTDLMKKFSEAFETTLGKMVPSFCSDAEDIDCRLEENLTKKYCLEYNYDYENGFAIGPGGWGAANRLDYSYDDFLDTVQETATSIGNAKSSRIKRSAPLSDYKIKLIFNITASVPLPDERNDTLEWENQQRLLQTLETITNKLKRTLNKDPMYSFQLASEILIADSNSLETKKASPFCRPGSVLRGRMCVNCPLGTYYNLEHFTCESCRIGSYQDEEGQLECKLCPSGMYTEYIHSRNISDCKAQCKQGTYSYSGLETCESCPLGTYQPKFGSRSCLSCPENTSTVKRGAVNISACGVPCPEGKFSRSGLMPCHPCPRDYYQPNAGKAFCLACPFYGTTPFAGSRSITECSSFSSTFSAAEESVVPPASLGHIKKRHEISSQASHECFFNPCHNSGTCQQLGRGYVCLCPLGYTGLKCETDIDECSPLPCLNNGVCKDLVGEFICECPSGYTGKHCELNINECQSNPCRNQATCVDELNSYSCKCQPGFSGKRCETGMYQLSVINNLNNAVCEDQVGGFLCKCPPGFLGTRCGKNVDECLSQPCKNGATCKDGANSFRCLCAAGFTGSHCELNINECQSNPCRNQATCVDELNSYSCKCQPGFSGKRCETEQSTGFNLDFEVSGIYGYVMLDGMLPSLHALTCTFWMKSSDDMNYGTPISYAVDNGSDNTLLLTDYNGWVLYVNGREKITNCPSVNDGRWHHIAITWTSTGGAWRVYINGELSDGGTGLSIGKAIPGGGALVLGQEQDKKGEGFNPAESFVGSISQLNLWDYVLSPQQVKSLATSCPEELSKGNVLAWPDFLSGIVGKVKIDSKSIFCSDCPRLGGSVPHLRTASEDLKPGSKVNLFCEPGFQLVGNPVQYCLNQGQWTQPLPHCERIRCGVPPPLENGFHSADDFYAGSTVTYQCNNGYYLLGDSRMFCTDNGSWNGVSPSCLDVDECAVGSDCSEHASCLNVDGSYICSCVPPYTGDGKNCAEPIKCKAPGNPENGHSSGEIYTVGAEVTFSCQEGYQLMGVTKITCLESGEWNHLIPYCKAVSCGKPAIPENGCIEELAFTFGSKVTYRCNKGYTLAGDKESSCLANSSWSHSPPVCEPVKCSSPENINNGKYILSGLTYLSTASYSCDTGYSLQGPSIIECTASGIWDRAPPACHLVFCGEPPAIKDAVITGNNFTFRNTVTYTCKEGYTLAGLDTIECLADGKWSRSDQQCLAVSCDEPPIVDHASPETAHRLFGDIAFYYCSDGYSLADNSQLLCNAQGKWVPPEGQDMPRCIAHFCEKPPSVSYSILESVSKAKFAAGSVVSFKCMEGFVLNTSAKIECMRGGQWNPSPMSIQCIPVRCGEPPSIMNGYASGSNYSFGAMVAYSCNKGFYIKGEKKSTCEATGQWSSPIPTCHPVSCGEPPKVENGFLEHTTGRIFESEVRYQCNPGYKSVGSPVFVCQANRHWHSESPLMCVPLDCGKPPPIQNGFMKGENFEVGSKVQFFCNEGYELVGDSSWTCQKSGKWNKKSNPKCMPAKCPEPPLLENQLVLKELTTEVGVVTFSCKEGHVLQGPSVLKCLPSQQWNDSFPVCKIVLCTPPPLISFGVPIPSSALHFGSTVKYSCVGGFFLRGNSTTLCQPDGTWSSPLPECVPVECPQPEEIPNGIIDVQGLAYLSTALYTCKPGFELVGNTTTLCGENGHWLGGKPTCKAIECLKPKEILNGKFSYTDLHYGQTVTYSCNRGFRLEGPSALTCLETGDWDVDAPSCNAIHCDSPQPIENGFVEGADYSYGAIIIYSCFPGFQVAGHAMQTCEESGWSSSIPTCMPIDCGLPPHIDFGDCTKLKDDQGYFEQEDDMMEVPYVTPHPPYHLGAVAKTWENTKESPATHSSNFLYGTMVSYTCNPGYELLGNPVLICQEDGTWNGSAPSCISIECDLPTAPENGFLRFTETSMGSAVQYSCKPGHILAGSDLRLCLENRKWSGASPRCEAISCKKPNPVMNGSIKGSNYTYLSTLYYECDPGYVLNGTERRTCQDDKNWDEDEPICIPVDCSSPPVSANGQVRGDEYTFQKEIEYTCNEGFLLEGARSRVCLANGSWSGATPDCVPVRCATPPQLANGVTEGLDYGFMKEVTFHCHEGYILHGAPKLTCQSDGNWDAEIPLCKPVNCGPPEDLAHGFPNGFSFIHGGHIQYQCFPGYKLHGNSSRRCLSNGSWSGSSPSCLPCRCSTPVIEYGTVNGTDFDCGKAARIQCFKGFKLLGLSEITCEADGQWSSGFPHCEHTSCGSLPMIPNAFISETSSWKENVITYSCRSGYVIQGSSDLICTEKGVWSQPYPVCEPLSCGSPPSVANAVATGEAHTYESEVKLRCLEGYTMDTDTDTFTCQKDGRWFPERISCSPKKCPLPENITHILVHGDDFSVNRQVSVSCAEGYTFEGVNISVCQLDGTWEPPFSDESCSPVSCGKPESPEHGFVVGSKYTFESTIIYQCEPGYELEGNRERVCQENRQWSGGVAICKETRCETPLEFLNGKADIENRTTGPNVVYSCNRGYSLEGPSEAHCTENGTWSHPVPLCKPNPCPVPFVIPENALLSEKEFYVDQNVSIKCREGFLLQGHGIITCNPDETWTQTSAKCEKISCGPPAHVENAIARGVHYQYGDMITYSCYSGYMLEGFLRSVCLENGTWTSPPICRAVCRFPCQNGGICQRPNACSCPEGWMGRLCEEPICILPCLNGGRCVAPYQCDCPPGWTGSRCHTAVCQSPCLNGGKCVRPNRCHCLSSWTGHNCSRKRRTGF

SEQ ID NO: 197 - DNA, 11158 bp, Homo sapiens
  CDS (77)..(10786)
caattggtctagggtctcccccattggaatatccatcagtgatgagaaatacaacgtttgttgagttttctctagcatgagaagaatttgcgcggcttgctggggtctggcgctcgtttcgggctgggcgacctttcagcagatgtccccgtcgcgcaatttcagcttccgcctcttccccgagaccgcgcccggggcccccgggagtatccccgcgccgcccgctcctggcgacgaagcggcggggagcagagtggagcggctgggccaggcgttccgcgtgcggctgctgcgggagctcagcgagcgcctggagcttgtcttcctggtggatgattcgtccagcgtgggcgaagtcaacttccgcagcgagctcatgttcgtccgcaagctgctgtccgacttccccgtggtgcccacggccacgcgcgtggccatcgtgaccttctcgtccaagaactacgtggtgccgcgcgtcgattacatctccacccgccgcgcgcgccagcacaagtgcgcgctgctcctccaagagatccctgccatctcctaccgaggtggcggcacctacaccaagggcgccttccagcaagccgcgcaaattcttcttcatgctagagaaaactcaacaaaagttgtatttctcatcactgatggatattccaatgggggagaccctagaccaattgcagcgtcactgcgagattcaggagtggagatcttcacttttggcatatggcaagggaacattcgagagctgaatgacatggcttccaccccaaaggaggagcactgttacctgctacacagttttgaagaatttgaggctttagtcgccctctgtcatatgttatttgtagatctaccttctgggagttttattcaagatgatatggtccactgctcatatctttgtgatgaaggcaaggactgctgtgaccgaatgggaagctgcaaatgtgggaaacacacaggccattttgagtgcatctgtgaaaaggggtataacgggaaaggtctgcagtatgactgcacagtttgcccatcggggacatacaaacctgaaggctcaccaggaggaatcagcagttgcattccatgtcctgatgaaaatcacacctctccacctggaagcacatcccctgaagactgtgtctgcagagagggatacagggcatctggccagacctgtgaagttgtccactgccctgccctgaagcctcccgaaaatggttactttatccaaaacacttgcaacaaccacttcaatgcagcctgtggggtccgatgtcaccctggatttgatcttgtgggaagcagcatcatcttatgtctacccaatggtttgtggtccggttcagagagctactgcagagtaagaacatgtcctcatctccgccagccgaaacatggccacatcagctgttctacaagggaaatgttatataagacaacatgtttggttgcctgtgatgaagggtacaggctagaaggcagtgataagcttacttgtcaaggaaacagccagtgggatgggccagaaccccggtgtgtggagcgccactgttccacctttcagatgcccaaagatgtcatcatatccccccacaactgtggcaagcagccagccaaatttgggacgatctgctatgtaagttgccgccaagggttcattttatctggagtcaaagaaatgctgagatgtaccacttctggaaaatggaatgtcggagttcaggcagctgtgtgtaaagacgtggaggctcctcaaatcaactgtcctaaggacatagaggctaagactctggaacagcaagattctgccaatgttacctggcagattccaacagctaaagacaactctggtgaaaaggtgtcagtccacgttcatccagctttcaccccaccttaccttttcccaattggagatgttgctatcgtatacacggcaactgacctatccggcaaccaggccagctgcattttccatatcaaggttattgatgcagaaccacctgtcatagactggtgcagatctccacctcccgtccaggtctcggagaaggtacatgccgcaagctgggatgagcctcagttctcagacaactcaggtgctgaattggtcattaccagaagtcatacacaaggagaccttttccctcaaggggagactatagtacagtatacagccactgacccctcaggcaataacaggacatgtgatatccatattgtcataaaaggttctccctgtgaaattccattcacacctgtaaatggggattttatatgcactccagataatactggagtcaactgtacattaacttgcttggagggctatgatttcacagaagggtctactgacaagtattattgtgcttatgaagatggcgtctggaagccaacatataccactgaatggccagactgtgccagtaagcgttttgcaaaccacgggttcaagtcctttgagatgttctacaaagcagctcgttgtgatgacacagatctgatgaagaagttttctgaagcatttgagacgaccctgggaaaaatggtcccatcattttgtagtgatgcagaggacattgactgcagactggaggagaacctgaccaaaaaatattgcctagaatataattatgactatgaaaatggctttgcaattggtccaggtggctggggtgcagctaataggctggattactcttacgatgacttcctggacactgtgcaagaaacagccacaagcatcggcaatgccaagtcctcacggattaaaagaagtgccccattatctgactataaaattaagttaatttttaacatcacagctagtgtgccattacccgatgaaagaaatgatacccttgaatgggaaaatcagcaacgactccttcagacattggaaactatcacaaataaactgaaaaggactctcaacaaagaccccatgtattcctttcagcttgcatcagaaatacttatagccgacagcaattcattagaaacaaaaaaggcttcccccttctgcagaccaggctcagtgctgagagggcgtatgtgtgtcaattgccctttgggaacctattataatctggaacatttcacctgtgaaagctgccggatcggatcctatcaagatgaagaagggcaacttgagtgcaagctttgcccctctgggatgtacacggaatatatccattcaagaaacatctctgattgtaaagctcagtgtaaacaaggcacctactcatacagtggacttgagacttgtgaatcgtgtccactgggcacttatcagccaaaatttggttcccggagctgcctctcgtgtccagaaaacacctcaactgtgaaaagaggagccgtgaacatttctgcatgtggagttccttgtccagaaggaaaattctcgcgttctgggttaatgccctgtcacccatgtcctcgtgactattaccaacctaatgcagggaaggccttctgcctggcctgtcccttttatggaactaccccattcgctggttccagatccatcacagaatgttcaagttttagttcaactttctcagcggcagaggaaagtgtggtgccccctgcctctcttggacatattaaaaagaggcatgaaatcagcagtcaggcaagtcatgaatgcttctttaacccttgccacaatagtggaacctgccagcaacttgggcgtggttatgtttgtctctgtccacttggatatacaggtttaaagtgtgaaacagacatcgatgagtgcagcccactgccttgcctcaacaatggagtttgtaaagacctagttggggaattcatttgtgagtgcccatcaggttacacaggtaagcactgtgaattgaacatcaatgaatgtcagtctaatccatgtagaaatcaggccacctgtgtggatgaattaaattcatacagttgtaaatgtcagccaggattttcaggcaaaaggtgtgaaacaggtatgtatcaactcagtgttattaataaccttaataatgcagtctgtgaagaccaggttgggggattcttgtgcaaatgcccacctggatttttgggtacccgatgtggaaagaacgtcgatgagtgtctcagtcagccatgcaaaaatggagctacctgtaaagacggtgccaatagcttcaggtgcctgtgtgcagctggcttcacaggatcacactgtgaattgaacatcaatgaatgtcagtctaatccatgtagaaatcaggccacctgtgtggatgaattaaattcatacagttgtaaatgtcagccaggattttcaggcaaaaggtgtgaaacagaacagtctacaggctttaacctggattttgaagtttctggcatctatggatatgtcatgctagatggcatgctcccatctctccatgctctaacctgtaccttctggatgaaatcctctgacgacatgaactatggaacaccaatctcctatgcagttgataacggcagcgacaataccttgctcctgactgattataacgggtgggttctttatgtgaatggcagggaaaagataacaaactgtccctcggtgaatgatggcagatggcatcatattgcaatcacttggacaagtactggtggagcctggagggtctatataaatggggaattatctgacggtggtactggcctctccattggcaaagccatacctggtggcggtgcattagttcttgggcaagagcaagacaaaaaaggagaggggttcaacccggctgagtcttttgtgggctccataagccagctcaacctctgggactatgtcctgtctccacagcaggtgaagtcactggctacctcctgcccagaggaactcagtaaaggaaacgtgttagcatggcctgatttcttgtcaggaattgtggggaaagtgaagatcgattctaagagcatattttgttctgattgcccacgcttgggagggtcagtgcctcatctgagaactgcatctgaagatttaaaaccaggttccaaagtcaatctgttctgtgaaccaggcttccagctggtcgggaaccctgtgcagtactgtctgaatcaaggacagtggacacaaccactcccccactgtgaacgcattcgctgtggggtgccacctcctttggagaatggcttccattcagccgatgacttctatgctggcagcacagtaacctaccagtgcaacaatggctactatctattgggtgactcaaggatgttctgtacagataatgggagctggaacggcgtttcaccatcctgcttagatgtcgatgagtgtgcagttggatcagattgtagtgagcatgcttcttgcctgaacgtagatggatcctacatatgttcatgtgtcccaccgtacacaggagatgggaaaaactgtgcagaacctataaaatgtaaggctccaggaaatccggaaaatggccactcctcaggtgagatttatacagtaggtgccgaagtcacattttcgtgtcaggaaggataccagttgatgggagtaaccaaaatcacatgtttggagtctggagaatggaatcatctaataccatattgtaaagctgtttcatgtggtaaaccggctattccagaaaatggttgcattgaggagttagcatttacttttggcagcaaagtgacatataggtgtaataaaggatatactctggccggtgataaagaatcatcctgtcttgctaacagttcttggagtcattcccctcctgtgtgtgaaccagtgaagtgttctagtccggaaaatataaataatggaaaatatattttgagtgggcttacctacctttctactgcatcatattcatgcgatacaggatacagcttacagggcccttccattattgaatgcacggcttctggcatctgggacagagcgccacctgcctgtcacctcgtcttctgtggagaaccacctgccatcaaagatgctgtcattacggggaataacttcactttcaggaacaccgtcacttacacttgcaaagaaggctatactcttgctggtcttgacaccattgaatgcctggccgacggcaagtggagtagaagtgaccagcagtgcctggctgtctcctgtgatgagccacccattgtggaccacgcctctccagagactgcccatcggctctttggagacattgcattctactactgctctgatggttacagcctagcagacaattcccagcttctctgcaatgcccagggcaagtgggtacccccagaaggtcaagacatgccccgttgtatagctcatttctgtgaaaaacctccatcggtttcctatagcatcttggaatctgtgagcaaagcaaaatttgcagctggctcagttgtgagctttaaatgcatggaaggctttgtactgaacacctcagcaaagattgaatgtatgagaggtgggcagtggaacccttcccccatgtccatccagtgcatccctgtgcggtgtggagagccaccaagcatcatgaatggctatgcaagtggatcaaactacagttttggagccatggtggcttacagctgcaacaaggggttctacatcaaaggggaaaagaagagcacctgcgaagccacagggcagtggagtagtcctataccgacgtgccacccggtatcttgtggtgaaccacctaaggttgagaatggctttctggagcatacaactggcaggatctttgagagtgaagtgaggtatcagtgtaacccgggctataagtcagtcggaagtcctgtatttgtctgccaagccaatcgccactggcacagtgaatcccctctgatgtgtgttcctctcgactgtggaaaacctcccccgatccagaatggcttcatgaaaggagaaaactttgaagtagggtccaaggttcagtttttctgtaatgagggttatgagcttgttggtgacagttcttggacatgtcagaaatctggcaaatggaataagaagtcaaatccaaagtgcatgcctgccaagtgcccagagccgcccctcttggaaaaccagctagtattaaaggagttgaccaccgaggtaggagttgtgacattttcctgtaaagaagggcatgtcctgcaaggcccctctgtcctgaaatgcttgccatcccagcaatggaatgactctttccctgtttgtaagattgttctttgtaccccacctcccctaatttcctttggtgtccccattccttcttctgctcttcattttggaagtactgtcaagtattcttgtgtaggtgggtttttcctaagaggaaattctaccaccctctgccaacctgatggcacctggagctctccactgccagaatgtgttccagtagaatgtccccaacctgaggaaatccccaatggaatcattgatgtgcaaggccttgcctatctcagcacagctctctatacctgcaagccaggctttgaattggtgggaaatactaccaccctttgtggagaaaatggtcactggcttggaggaaaaccaacatgtaaagccattgagtgcctgaaacccaaggagattttgaatggcaaattctcttacacggacctacactatggacagaccgttacctactcttgcaaccgaggctttcggctcgaaggtcccagtgccttgacctgtttagagacaggtgattgggatgtagatgccccatcttgcaatgccatccactgtgattccccacaacccattgaaaatggttttgtagaaggtgcagattacagctatggtgccataatcatctacagttgcttccctgggtttcaggtggctggtcatgccatgcagacctgtgaagagtcaggatggtcaagttccatcccaacatgtatgccaatagactgtggcctccctcctcatatagattttggagactgtactaaactcaaagatgaccagggatattttgagcaagaagacgacatgatggaagttccatatgtgactcctcaccctccttatcatttgggagcagtggctaaaacctgggaaaatacaaaggagtctcctgctacacattcatcaaactttctgtatggtaccatggtttcatacacctgtaatccaggatatgaacttctggggaaccctgtgctgatctgccaggaagatggaacttggaatggcagtgcaccatcctgcatttcaattgaatgtgacttgcctactgctcctgaaaatggctttttgcgttttacagagactagcatgggaagtgctgtgcagtatagctgtaaacctggacacattctagcaggctctgacttaaggctttgtctagagaatagaaagtggagtggtgcctccccacgctgtgaagccatttcatgcaaaaagccaaatccagtcatgaatggatccatcaaaggaagcaactacacatacctgagcacgttgtactatgagtgtgaccccggatatgtgctgaatggcactgagaggagaacatgccaggatgacaaaaactgggatgaggatgagcccatttgcattcctgtggactgcagttcacccccagtctcagccaatggccaggtgagaggagacgagtacacattccaaaaagagattgaatacacttgcaatgaagggttcttgcttgagggagccaggagtcgggtttgtcttgccaatggaagttggagtggagccactcccgactgtgtgcctgtcagatgtgccaccccgccacaactggccaatggggtgacggaaggcctggactatggcttcatgaaggaagtaacattccactgtcacgagggctacatcttgcacggtgctccaaaactcacctgtcagtcagatggcaactgggatgcagagattcctctctgtaaaccagtcaactgtggacctcctgaagatcttgcccatggtttccctaatggtttttcctttattcatgggggccatatacagtatcagtgctttcctggttataagctccatggaaattcatcaagaaggtgcctctccaatggctcctggagtggcagctcaccttcctgcctgccttgcagatgttccacaccagtaattgaatatggaactgtcaatgggacagattttgactgtggaaaggcagcccggattcagtgcttcaaaggcttcaagctcctaggactttctgaaatcacctgtgaagccgatggccagtggagctctgggttcccccactgtgaacacacttcttgtggttctcttccaatgataccaaatgcgttcatcagtgagaccagctcttggaaggaaaatgtgataacttacagctgcaggtctggatatgtcatacaaggcagttcagatctgatttgtacagagaaaggggtatggagccagccttatccagtctgtgagcccttgtcctgtgggtccccaccgtctgtcgccaatgcagtggcaactggagaggcacacacctatgaaagtgaagtgaaactcagatgtctggaaggttatacgatggatacagatacagatacattcacctgtcagaaagatggtcgctggttccctgagagaatctcctgcagtcctaaaaaatgtcctctcccggaaaacataacacatatacttgtacatggggacgatttcagtgtgaataggcaagtttctgtgtcatgtgcagaagggtatacctttgagggagttaacatatcagtatgtcagcttgatggaacctgggagccaccattctccgatgaatcttgcagtccagtttcttgtgggaaacctgaaagtccagaacatggatttgtggttggcagtaaatacacctttgaaagcacaattatttatcagtgtgagcctggctatgaactagaggggaacagggaacgtgtctgccaggagaacagacagtggagtggaggggtggcaatatgcaaagagaccaggtgtgaaactccacttgaatttctcaatgggaaagctgacattgaaaacaggacgactggacccaacgtggtatattcctgcaacagaggctacagtcttgaagggccatctgaggcacactgcacagaaaatggaacctggagccacccagtccctctctgcaaaccaaatccatgccctgttccttttgtgattcccgagaatgctctgctgtctgaaaaggagttttatgttgatcagaatgtgtccatcaaatgtagggaaggttttctgctgcagggccacggcatcattacctgcaaccccgacgagacgtggacacagacaagcgccaaatgtgaaaaaatctcatgtggtccaccagctcacgtagaaaatgcaattgctcgaggcgtacattatcaatatggagacatgatcacctactcatgttacagtggatacatgttggagggtttcctgaggagtgtttgtttagaaaatggaacatggacatcacctcctatttgcagagctgtctgtcgatttccatgtcagaatgggggcatctgccaacgcccaaatgcttgttcctgtccagagggctggatggggcgcctctgtgaagaaccaatctgcattcttccctgtctgaacggaggtcgctgtgtggccccttaccagtgtgactgcccgcctggctggacggggtctcgctgtcatacagctgtttgccagtctccctgcttaaatggtggaaaatgtgtaagaccaaaccgatgtcactgtctttcttcttggacgggacataactgttccaggaaaaggaggactgggttttaaccactgcacgaccatctggctctcccaaaagcaggatcatctctcctcggtagtgcctgggcatcctggaacttatgcaaagaaagtccaacatggtgctgggtcttgtttagtaaacttgttacttggggttactttttttattttgtgatatattttgttattccttgtgacatactttcttacatgtttccatttttaaatatgcctgtattttctatataaaaattatattaaatagatgctgctctaccctcacaaaatgtacatattctgctgtctattgggaaagttcctggtacacatttttattcagttacttaaaatgatttttccattaaagtatattttgctactaaataaaaaaaa

SEQ ID NO: 198 - protein, 3570 aa, Homo sapiens; identical to SEQ ID NO: 178

SEQ ID NO: 199 - DNA, 11158 bp, Homo sapiens
  CDS (77)..(10786)
caattggtctagggtctcccccattggaatatccatcagtgatgagaaatacaacgtttgttgagttttctctagcatgagaagaatttgcgcggcttgctggggtctggcgctcgtttcgggctgggcgacctttcagcagatgtccccgtcgcgcaatttcagcttccgcctcttccccgagaccgcgcccggggcccccgggagtatccccgcgccgcccgctcctggcgacgaagcggcggggagcagagtggagcggctgggccaggcgttccgcgtgcggctgctgcgggagctcagcgagcgcctggagcttgtcttcctggtggatgattcgtccagcgtgggcgaagtcaacttccgcagcgagctcatgttcgtccgcaagctgctgtccgacttccccgtggtgcccacggccacgcgcgtggccatcgtgaccttctcgtccaagaactacgtggtgccgcgcgtcgattacatctccacccgccgcgcgcgccagcacaagtgcgcgctgctcctccaagagatccctgccatctcctaccgaggtggcggcacctacaccaagggcgccttccagcaagccgcgcaaattcttcttcatgctagagaaaactcaacaaaagttgtatttctcatcactgatggatattccaatgggggagaccctagaccaattgcagcgtcactgcgagattcaggagtggagatcttcacttttggcatatggcaagggaacattcgagagctgaatgacatggcttccaccccaaaggaggagcactgttacctgctacacagttttgaagaatttgaggctttagtcgccctctgtcatatgttatttgtagatctaccttctgggagttttattcaagatgatatggtccactgctcatatctttgtgatgaaggcaaggactgctgtgaccgaatgggaagctgcaaatgtgggaaacacacaggccattttgagtgcatctgtgaaaaggggtataacgggaaaggtctgcagtatgactgcacagtttgcccatcggggacatacaaacctgaaggctcaccaggaggaatcagcagttgcattccatgtcctgatgaaaatcacacctctccacctggaagcacatcccctgaagactgtgtctgcagagagggatacagggcatctggccagacctgtgaagttgtccactgccctgccctgaagcctcccgaaaatggttactttatccaaaacacttgcaacaaccacttcaatgcagcctgtggggtccgatgtcaccctggatttgatcttgtgggaagcagcatcatcttatgtctacccaatggtttgtggtccggttcagagagctactgcagagtaagaacatgtcctcatctccgccagccgaaacatggccacatcagctgttctacaagggaaatgttatataagacaacatgtttggttgcctgtgatgaagggtacaggctagaaggcagtgataagcttacttgtcaaggaaacagccagtgggatgggccagaaccccggtgtgtggagcgccactgttccacctttcagatgcccaaagatgtcatcatatccccccacaactgtggcaagcagccagccaaatttgggacgatctgctatgtaagttgccgccaagggttcattttatctggagtcaaagaaatgctgagatgtaccacttctggaaaatggaatgtcggagttcaggcagctgtgtgtaaagacgtggaggctcctcaaatcaactgtcctaaggacatagaggctaagactctggaacagcaagattctgccaatgttacctggcagattccaacagctaaagacaactctggtgaaaaggtgtcagtccacgttcatccagctttcaccccaccttaccttttcccaattggagatgttgctatcgtatacacggcaactgacctatccggcaaccaggccagctgcattttccatatcaaggttattgatgcagaaccacctgtcatagactggtgcagatctccacctcccgtccaggtctcggagaaggtacatgccgcaagctgggatgagcctcagttctcagacaactcaggtgctgaattggtcattaccagaagtcatacacaaggagaccttttccctcaaggggagactatagtacagtatacagccactgacccctcaggcaataacaggacatgtgatatccatattgtcataaaaggttctccctgtgaaattccattcacacctgtaaatggggattttatatgcactccagataatactggagtcaactgtacattaacttgcttggagggctatgatttcacagaagggtctactgacaagtattattgtgcttatgaagatggcgtctggaaaccaacatataccactgaatggccagactgtgccagtaagcgttttgcaaaccgcgggttcaagtcctttgagatgttctacaaagcagctcgttgtgatgacacagatctgatgaagaagttttctgaagcatttgagacgaccctgggaaaaatggtcccatcattttgtagtgatgcagaggacattgactgcagactggaggagaacctgaccaaaaaatattgcctagaatataattatgactatgaaaatggctttgcaattggtccaggtggctggggtgcagctaataggctggattactcttacgatgacttcctggacactgtgcaagaaacagccacaagcatcggcaatgccaagtcctcacggattaaaagaagtgccccattatctgactataaaattaagttaatttttaacatcacagctagtgtgccattacccgatgaaagaaatgatacccttgaatgggaaaatcagcaacgactccttcagacattggaaactatcacaaataaactgaaaaggactctcaacaaagaccccatgtattcctttcagcttgcatcagaaatacttatagccgacagcaattcattagaaacaaaaaaggcttcccccttctgcagaccaggctcagtgctgagagggcgtatgtgtgtcaattgccctttgggaacctattataatctggaacatttcacctgtgaaagctgccggatcggatcctatcaagatgaagaagggcaacttgagtgcaagctttgcccctctgggatgtacacggaatatatccattcaagaaacatctctgattgtaaagctcagtgtaaacaaggcacctactcatacagtggacttgagacttgtgaatcgtgtccactgggcacttatcagccaaaatttggttcccggagctgcctctcgtgtccagaaaacacctcaactgtgaaaagaggagccgtgaacatttctgcatgtggagttccttgtccagaaggaaaattctcgcgttctgggttaatgccctgtcacccatgtcctcgtgactattaccaacctaatgcagggaaggccttctgcctggcctgtcccttttatggaactaccccattcgctggttccagatccatcacagaatgttcaagttttagttcaactttctcagcggcagaggaaagtgtggtgccccctgcctctcttggacatattaaaaagaggcatgaaatcagcagtcaggcaagtcatgaatgcttctttaacccttgccacaatagtggaacctgccagcaacttgggcgtggttatgtttgtctctgtccacttggatatacaggtttaaagtgtgaaacagacatcgatgagtgcagcccactgccttgcctcaacaatggagtttgtaaagacctagttggggaattcatttgtgagtgcccatcaggttacacaggtaagcactgtgaattgaacatcaatgaatgtcagtctaatccatgtagaaatcaggccacctgtgtggatgaattaaattcatacagttgtaaatgtcagccaggattttcaggcaaaaggtgtgaaacaggtatgtatcaactcagtgttattaataaccttaataatgcagtctgtgaagaccaggttgggggattcttgtgcaaatgcccacctggatttttgggtacccgatgtggaaagaacgtcgatgagtgtctcagtcagccatgcaaaaatggagctacctgtaaagacggtgccaatagcttcaggtgcctgtgtgcagctggcttcacaggatcacactgtgaattgaacatcaatgaatgtcagtctaatccatgtagaaatcaggccacctgtgtggatgaattaaattcatacagttgtaaatgtcagccaggattttcaggcaaaaggtgtgaaacagaacagtctacaggctttaacctggattttgaagtttctggcatctatggatatgtcatgctagatggcatgctcccatctctccatgctctaacctgtaccttctggatgaaatcctctgacgacatgaactatggaacaccaatctcctatgcagttgataacggcagcgacaataccttgctcctgactgattataacgggtgggttctttatgtgaatggcagggaaaagataacaaactgtccctcggtgaatgatggcagatggcatcatattgcaatcacttggacaagtactggtggagcctggagggtctatataaatggggaattatctgacggtggtactggcctctccattggcaaagccatacctggtggcggtgcattagttcttgggcaagagcaagacaaaaaaggagaggggttcaacccggctgagtcttttgtgggctccataagccagctcaacctctgggactatgtcctgtctccacagcaggtgaagtcactggctacctcctgcccagaggaactcagtaaaggaaacgtgttagcatggcctgatttcttgtcaggaattgtggggaaagtgaagatcgattctaagagcatattttgttctgattgcccacgcttgggagggtcagtgcctcatctgagaactgcatctgaagatttaaaaccaggttccaaagtcaatctgttctgtgaaccaggcttccagctggtcgggaaccctgtgcagtactgtctgaatcaaggacagtggacacaaccactcccccactgtgaacgcattcgctgtggggtgccacctcctttggagaatggcttccattcagccgatgacttctatgctggcagcacagtaacctaccagtgcaacaatggctactatctattgggtgactcaaggatgttctgtacagataatgggagctggaacggcgtttcaccatcctgcttagatgtcgatgagtgtgcagttggatcagattgtagtgagcatgcttcttgcctgaacgtagatggatcctacatatgttcatgtgtcccaccgtacacaggagatgggaaaaactgtgcagaacctataaaatgtaaggctccaggaaatccggaaaatggccactcctcaggtgagatttatacagtaggtgccgaagtcacattttcgtgtcaggaaggataccagttgatgggagtaaccaaaatcacatgtttggagtctggagaatggaatcatctaataccatattgtaaagctgtttcatgtggtaaaccggctattccagaaaatggttgcattgaggagttagcatttacttttggcagcaaagtgacatataggtgtaataaaggatatactctggccggtgataaagaatcatcctgtcttgctaacagttcttggagtcattcccctcctgtgtgtgaaccagtgaagtgttctagtccggaaaatataaataatggaaaatatattttgagtgggcttacctacctttctactgcatcatattcatgcgatacaggatacagcttacagggcccttccattattgaatgcacggcttctggcatctgggacagagcgccacctgcctgtcacctcgtcttctgtggagaaccacctgccatcaaagatgctgtcattacggggaataacttcactttcaggaacaccgtcacttacacttgcaaagaaggctatactcttgctggtcttgacaccattgaatgcctggccgacggcaagtggagtagaagtgaccagcagtgcctggctgtctcctgtgatgagccacccattgtggaccacgcctctccagagactgcccatcggctctttggagacattgcattctactactgctctgatggttacagcctagcagacaattcccagcttctctgcaatgcccagggcaagtgggtacccccagaaggtcaagacatgccccgttgtatagctcatttctgtgaaaaacctccatcggtttcctatagcatcttggaatctgtgagcaaagcaaaatttgcagctggctcagttgtgagctttaaatgcatggaaggctttgtactgaacacctcagcaaagattgaatgtatgagaggtgggcagtggaacccttcccccatgtccatccagtgcatccctgtgcggtgtggagagccaccaagcatcatgaatggctatgcaagtggatcaaactacagttttggagccatggtggcttacagctgcaacaaggggttctacatcaaaggggaaaagaagagcacctgcgaagccacagggcagtggagtagtcctataccgacgtgccacccggtatcttgtggtgaaccacctaaggttgagaatggctttctggagcatacaactggcaggatctttgagagtgaagtgaggtatcagtgtaacccgggctataagtcagtcggaagtcctgtatttgtctgccaagccaatcgccactggcacagtgaatcccctctgatgtgtgttcctctcgactgtggaaaacctcccccgatccagaatggcttcatgaaaggagaaaactttgaagtagggtccaaggttcagtttttctgtaatgagggttatgagcttgttggtgacagttcttggacatgtcagaaatctggcaaatggaataagaagtcaaatccaaagtgcatgcctgccaagtgcccagagccgcccctcttggaaaaccagctagtattaaaggagttgaccaccgaggtaggagttgtgacattttcctgtaaagaagggcatgtcctgcaaggcccctctgtcctgaaatgcttgccatcccagcaatggaatgactctttccctgtttgtaagattgttctttgtaccccacctcccctaatttcctttggtgtccccattccttcttctgctcttcattttggaagtactgtcaagtattcttgtgtaggtgggtttttcctaagaggaaattctaccaccctctgccaacctgatggcacctggagctctccactgccagaatgtgttccagtagaatgtccccaacctgaggaaatccccaatggaatcattgatgtgcaaggccttgcctatctcagcacagctctctatacctgcaagccaggctttgaattggtgggaaatactaccaccctttgtggagaaaatggtcactggcttggaggaaaaccaacatgtaaagccattgagtgcctgaaacccaaggagattttgaatggcaaattctcttacacggacctacactatggacagaccgttacctactcttgcaaccgaggctttcggctcgaaggtcccagtgccttgacctgtttagagacaggtgattgggatgtagatgccccatcttgcaatgccatccactgtgattccccacaacccattgaaaatggttttgtagaaggtgcagattacagctatggtgccataatcatctacagttgcttccctgggtttcaggtggctggtcatgccatgcagacctgtgaagagtcaggatggtcaagttccatcccaacatgtatgccaatagactgtggcctccctcctcatatagattttggagactgtactaaactcaaagatgaccagggatattttgagcaagaagacgacatgatggaagttccatatgtgactcctcaccctccttatcatttgggagcagtggctaaaacctgggaaaatacaaaggagtctcctgctacacattcatcaaactttctgtatggtaccatggtttcatacacctgtaatccaggatatgaacttctggggaaccctgtgctgatctgccaggaagatggaacttggaatggcagtgcaccatcctgcatttcaattgaatgtgacttgcctactgctcctgaaaatggctttttgcgttttacagagactagcatgggaagtgctgtgcagtatagctgtaaacctggacacattctagcaggctctgacttaaggctttgtctagagaatagaaagtggagtggtgcctccccacgctgtgaagccatttcatgcaaaaagccaaatccagtcatgaatggatccatcaaaggaagcaactacacatacctgagcacgttgtactatgagtgtgaccccggatatgtgctgaatggcactgagaggagaacatgccaggatgacaaaaactgggatgaggatgagcccatttgcattcctgtggactgcagttcacccccagtctcagccaatggccaggtgagaggagacgagtacacattccaaaaagagattgaatacacttgcaatgaagggttcttgcttgagggagccaggagtcgggtttgtcttgccaatggaagttggagtggagccactcccgactgtgtgcctgtcagatgtgccaccccgccacaactggccaatggggtgacggaaggcctggactatggcttcatgaaggaagtaacattccactgtcacgagggctacatcttgcacggtgctccaaaactcacctgtcagtcagatggcaactgggatgcagagattcctctctgtaaaccagtcaactgtggacctcctgaagatcttgcccatggtttccctaatggtttttcctttattcatgggggccatatacagtatcagtgctttcctggttataagctccatggaaattcatcaagaaggtgcctctccaatggctcctggagtggcagctcaccttcctgcctgccttgcagatgttccacaccagtaattgaatatggaactgtcaatgggacagattttgactgtggaaaggcagcccggattcagtgcttcaaaggcttcaagctcctaggactttctgaaatcacctgtgaagccgatggccagtggagctctgggttcccccactgtgaacacacttcttgtggttctcttccaatgataccaaatgcgttcatcagtgagaccagctcttggaaggaaaatgtgataacttacagctgcaggtctggatatgtcatacaaggcagttcagatctgatttgtacagagaaaggggtatggagccagccttatccagtctgtgagcccttgtcctgtgggtccccaccgtctgtcgccaatgcagtggcaactggagaggcacacacctatgaaagtgaagtgaaactcagatgtctggaaggttatacgatggatacagatacagatacattcacctgtcagaaagatggtcgctggttccctgagagaatctcctgcagtcctaaaaaatgtcctctcccggaaaacataacacatatacttgtacatggggacgatttcagtgtgaataggcaagtttctgtgtcatgtgcagaagggtatacctttgagggagttaacatatcagtatgtcagcttgatggaacctgggagccaccattctccgatgaatcttgcagtccagtttcttgtgggaaacctgaaagtccagaacatggatttgtggttggcagtaaatacacctttgaaagcacaattatttatcagtgtgagcctggctatgaactagaggggaacagggaacgtgtctgccaggagaacagacagtggagtggaggggtggcaatatgcaaagagaccaggtgtgaaactccacttgaatttctcaatgggaaagctgacattgaaaacaggacgactggacccaacgtggtatattcctgcaacagaggctacagtcttgaagggccatctgaggcacactgcacagaaaatggaacctggagccacccagtccctctctgcaaaccaaatccatgccctgttccttttgtgattcccgagaatgctctgctgtctgaaaaggagttttatgttgatcagaatgtgtccatcaaatgtagggaaggttttctgctgcagggccacggcatcattacctgcaaccccgacgagacgtggacacagacaagcgccaaatgtgaaaaaatctcatgtggtccaccagctcacgtagaaaatgcaattgctcgaggcgtacattatcaatatggagacatgatcacctactcatgttacagtggatacatgttggagggtttcctgaggagtgtttgtttagaaaatggaacatggacatcacctcctatttgcagagctgtctgtcgatttccatgtcagaatgggggcatctgccaacgcccaaatgcttgttcctgtccagagggctggatggggcgcctctgtgaagaaccaatctgcattcttccctgtctgaacggaggtcgctgtgtggccccttaccagtgtgactgcccgcctggctggacggggtctcgctgtcatacagctgtttgccagtctccctgcttaaatggtggaaaatgtgtaagaccaaaccgatgtcactgtctttcttcttggacgggacataactgttccaggaaaaggaggactgggttttaaccactgcacgaccatctggctctcccaaaagcaggatcatctctcctcggtagtgcctgggcatcctggaacttatgcaaagaaagtccaacatggtgctgggtcttgtttagtaaacttgttacttggggttactttttttattttgtgatatattttgttattccttgtgacatactttcttacatgtttccatttttaaatatgcctgtattttctatataaaaattatattaaatagatgctgctctaccctcacaaaatgtacatattctgctgtctattgggaaagttcctggtacacatttttattcagttacttaaaatgatttttccattaaagtatattttgctactaaataaaaaaaa

SEQ ID NO: 200 - protein, 3570 aa, Homo sapiens
MRRICAACWGLALVSGWATFQQMSPSRNFSFRLFPETAPGAPGSIPAPPAPGDEAAGSRVERLGQAFRVRLLRELSERLELVFLVDDSSSVGEVNFRSELMFVRKLLSDFPVVPTATRVAIVTFSSKNYVVPRVDYISTRRARQHKCALLLQEIPAISYRGGGTYTKGAFQQAAQILLHARENSTKVVFLITDGYSNGGDPRPIAASLRDSGVEIFTFGIWQGNIRELNDMASTPKEEHCYLLHSFEEFEALVALCHMLFVDLPSGSFIQDDMVHCSYLCDEGKDCCDRMGSCKCGKHTGHFECICEKGYNGKGLQYDCTVCPSGTYKPEGSPGGISSCIPCPDENHTSPPGSTSPEDCVCREGYRASGQTCEVVHCPALKPPENGYFIQNTCNNHFNAACGVRCHPGFDLVGSSIILCLPNGLWSGSESYCRVRTCPHLRQPKHGHISCSTREMLYKTTCLVACDEGYRLEGSDKLTCQGNSQWDGPEPRCVERHCSTFQMPKDVIISPHNCGKQPAKFGTICYVSCRQGFILSGVKEMLRCTTSGKWNVGVQAAVCKDVEAPQINCPKDIEAKTLEQQDSANVTWQIPTAKDNSGEKVSVHVHPAFTPPYLFPIGDVAIVYTATDLSGNQASCIFHIKVIDAEPPVIDWCRSPPPVQVSEKVHAASWDEPQFSDNSGAELVITRSHTQGDLFPQGETIVQYTATDPSGNNRTCDIHIVIKGSPCEIPFTPVNGDFICTPDNTGVNCTLTCLEGYDFTEGSTDKYYCAYEDGVWKPTYTTEWPDCASKRFANRGFKSFEMFYKAARCDDTDLMKKFSEAFETTLGKMVPSFCSDAEDIDCRLEENLTKKYCLEYNYDYENGFAIGPGGWGAANRLDYSYDDFLDTVQETATSIGNAKSSRIKRSAPLSDYKIKLIFNITASVPLPDERNDTLEWENQQRLLQTLETITNKLKRTLNKDPMYSFQLASEILIADSNSLETKKASPFCRPGSVLRGRMCVNCPLGTYYNLEHFTCESCRIGSYQDEEGQLECKLCPSGMYTEYIHSRNISDCKAQCKQGTYSYSGLETCESCPLGTYQPKFGSRSCLSCPENTSTVKRGAVNISACGVPCPEGKFSRSGLMPCHPCPRDYYQPNAGKAFCLACPFYGTTPFAGSRSITECSSFSSTFSAAEESVVPPASLGHIKKRHEISSQASHECFFNPCHNSGTCQQLGRGYVCLCPLGYTGLKCETDIDECSPLPCLNNGVCKDLVGEFICECPSGYTGKHCELNINECQSNPCRNQATCVDELNSYSCKCQPGFSGKRCETGMYQLSVINNLNNAVCEDQVGGFLCKCPPGFLGTRCGKNVDECLSQPCKNGATCKDGANSFRCLCAAGFTGSHCELNINECQSNPCRNQATCVDELNSYSCKCQPGFSGKRCETEQSTGFNLDFEVSGIYGYVMLDGMLPSLHALTCTFWMKSSDDMNYGTPISYAVDNGSDNTLLLTDYNGWVLYVNGREKITNCPSVNDGRWHHIAITWTSTGGAWRVYINGELSDGGTGLSIGKAIPGGGALVLGQEQDKKGEGFNPAESFVGSISQLNLWDYVLSPQQVKSLATSCPEELSKGNVLAWPDFLSGIVGKVKIDSKSIFCSDCPRLGGSVPHLRTASEDLKPGSKVNLFCEPGFQLVGNPVQYCLNQGQWTQPLPHCERIRCGVPPPLENGFHSADDFYAGSTVTYQCNNGYYLLGDSRMFCTDNGSWNGVSPSCLDVDECAVGSDCSEHASCLNVDGSYICSCVPPYTGDGKNCAEPIKCKAPGNPENGHSSGEIYTVGAEVTFSCQEGYQLMGVTKITCLESGEWNHLIPYCKAVSCGKPAIPENGCIEELAFTFGSKVTYRCNKGYTLAGDKESSCLANSSWSHSPPVCEPVKCSSPENINNGKYILSGLTYLSTASYSCDTGYSLQGPSIIECTASGIWDRAPPACHLVFCGEPPAIKDAVITGNNFTFRNTVTYTCKEGYTLAGLDTIECLADGKWSRSDQQCLAVSCDEPPIVDHASPETAHRLFGDIAFYYCSDGYSLADNSQLLCNAQGKWVPPEGQDMPRCIAHFCEKPPSVSYSILESVSKAKFAAGSVVSFKCMEGFVLNTSAKIECMRGGQWNPSPMSIQCIPVRCGEPPSIMNGYASGSNYSFGAMVAYSCNKGFYIKGEKKSTCEATGQWSSPIPTCHPVSCGEPPKVENGFLEHTTGRIFESEVRYQCNPGYKSVGSPVFVCQANRHWHSESPLMCVPLDCGKPPPIQNGFMKGENFEVGSKVQFFCNEGYELVGDSSWTCQKSGKWNKKSNPKCMPAKCPEPPLLENQLVLKELTTEVGVVTFSCKEGHVLQGPSVLKCLPSQQWNDSFPVCKIVLCTPPPLISFGVPIPSSALHFGSTVKYSCVGGFFLRGNSTTLCQPDGTWSSPLPECVPVECPQPEEIPNGIIDVQGLAYLSTALYTCKPGFELVGNTTTLCGENGHWLGGKPTCKAIECLKPKEILNGKFSYTDLHYGQTVTYSCNRGFRLEGPSALTCLETGDWDVDAPSCNAIHCDSPQPIENGFVEGADYSYGAIIIYSCFPGFQVAGHAMQTCEESGWSSSIPTCMPIDCGLPPHIDFGDCTKLKDDQGYFEQEDDMMEVPYVTPHPPYHLGAVAKTWENTKESPATHSSNFLYGTMVSYTCNPGYELLGNPVLICQEDGTWNGSAPSCISIECDLPTAPENGFLRFTETSMGSAVQYSCKPGHILAGSDLRLCLENRKWSGASPRCEAISCKKPNPVMNGSIKGSNYTYLSTLYYECDPGYVLNGTERRTCQDDKNWDEDEPICIPVDCSSPPVSANGQVRGDEYTFQKEIEYTCNEGFLLEGARSRVCLANGSWSGATPDCVPVRCATPPQLANGVTEGLDYGFMKEVTFHCHEGYILHGAPKLTCQSDGNWDAEIPLCKPVNCGPPEDLAHGFPNGFSFIHGGHIQYQCFPGYKLHGNSSRRCLSNGSWSGSSPSCLPCRCSTPVIEYGTVNGTDFDCGKAARIQCFKGFKLLGLSEITCEADGQWSSGFPHCEHTSCGSLPMIPNAFISETSSWKENVITYSCRSGYVIQGSSDLICTEKGVWSQPYPVCEPLSCGSPPSVANAVATGEAHTYESEVKLRCLEGYTMDTDTDTFTCQKDGRWFPERISCSPKKCPLPENITHILVHGDDFSVNRQVSVSCAEGYTFEGVNISVCQLDGTWEPPFSDESCSPVSCGKPESPEHGFVVGSKYTFESTIIYQCEPGYELEGNRERVCQENRQWSGGVAICKETRCETPLEFLNGKADIENRTTGPNVVYSCNRGYSLEGPSEAHCTENGTWSHPVPLCKPNPCPVPFVIPENALLSEKEFYVDQNVSIKCREGFLLQGHGIITCNPDETWTQTSAKCEKISCGPPAHVENAIARGVHYQYGDMITYSCYSGYMLEGFLRSVCLENGTWTSPPICRAVCRFPCQNGGICQRPNACSCPEGWMGRLCEEPICILPCLNGGRCVAPYQCDCPPGWTGSRCHTAVCQSPCLNGGKCVRPNRCHCLSSWTGHNCSRKRRTGF

SEQ ID NO: 201 - DNA, 11158 bp, Homo sapiens
  CDS (77)..(10786)
caattggtctagggtctcccccattggaatatccatcagtgatgagaaatacaacgtttgttgagttttctctagcatgagaagaatttgcgcggcttgctggggtctggcgctcgtttcgggctgggcgacctttcagcagatgtccccgtcgcgcaatttcagcttccgcctcttccccgagaccgcgcccggggcccccgggagtatccccgcgccgcccgctcctggcgacgaagcggcggggagcagagtggagcggctgggccaggcgttccgcgtgcggctgctgcgggagctcagcgagcgcctggagcttgtcttcctggtggatgattcgtccagcgtgggcgaagtcaacttccgcagcgagctcatgttcgtccgcaagctgctgtccgacttccccgtggtgcccacggccacgcgcgtggccatcgtgaccttctcgtccaagaactacgtggtgccgcgcgtcgattacatctccacccgccgcgcgcgccagcacaagtgcgcgctgctcctccaagagatccctgccatctcctaccgaggtggcggcacctacaccaagggcgccttccagcaagccgcgcaaattcttcttcatgctagagaaaactcaacaaaagttgtatttctcatcactgatggatattccaatgggggagaccctagaccaattgcagcgtcactgcgagattcaggagtggagatcttcacttttggcatatggcaagggaacattcgagagctgaatgacatggcttccaccccaaaggaggagcactgttacctgctacacagttttgaagaatttgaggctttagtcgccctctgtcatatgttatttgtagatctaccttctgggagttttattcaagatgatatggtccactgctcatatctttgtgatgaaggcaaggactgctgtgaccgaatgggaagctgcaaatgtgggaaacacacaggccattttgagtgcatctgtgaaaaggggtataacgggaaaggtctgcagtatgactgcacagtttgcccatcggggacatacaaacctgaaggctcaccaggaggaatcagcagttgcattccatgtcctgatgaaaatcacacctctccacctggaagcacatcccctgaagactgtgtctgcagagagggatacagggcatctggccagacctgtgaagttgtccactgccctgccctgaagcctcccgaaaatggttactttatccaaaacacttgcaacaaccacttcaatgcagcctgtggggtccgatgtcaccctggatttgatcttgtgggaagcagcatcatcttatgtctacccaatggtttgtggtccggttcagagagctactgcagagtaagaacatgtcctcatctccgccagccgaaacatggccacatcagctgttctacaagggaaatgttatataagacaacatgtttggttgcctgtgatgaagggtacaggctagaaggcagtgataagcttacttgtcaaggaaacagccagtgggatgggccagaaccccggtgtgtggagcgccactgttccacctttcagatgcccaaagatgtcatcatatccccccacaactgtggcaagcagccagccaaatttgggacgatctgctatgtaagttgccgccaagggttcattttatctggagtcaaagaaatgctgagatgtaccacttctggaaaatggaatgtcggagttcaggcagctgtgtgtaaagacgtggaggctcctcaaatcaactgtcctaaggacatagaggctaagactctggaacagcaagattctgccaatgttacctggcagattccaacagctaaagacaactctggtgaaaaggtgtcagtccacgttcatccagctttcaccccaccttaccttttcccaattggagatgttgctatcgtatacacggcaactgacctatccggcaaccaggccagctgcattttccatatcaaggttattgatgcagaaccacctgtcatagactggtgcagatctccacctcccgtccaggtctcggagaaggtacatgccgcaagctgggatgagcctcagttctcagacaactcaggtgctgaattggtcattaccagaagtcatacacaaggagaccttttccctcaaggggagactatagtacagtatacagccactgacccctcaggcaataacaggacatgtgatatccatattgtcataaaaggttctccctgtgaaattccattcacacctgtaaatggggattttatatgcactccagataatactggagtcaactgtacattaacttgcttggagggctatgatttcacagaagggtctactgacaagtattattgtgcttatgaagatggcgtctggaaaccaacatataccactgaatggccagactgtgccagtaagcgttttgcaaaccacgggttcaagtcctttgagatgttctacaaagcagctcgttgtgatgacacagatctgatgaagaagttttctgaagcatttgagacgaccctgggaaaaatggtcccatcattttgtagtgatgcagaggacattgactgcagactggaggagaacctgaccaaaaaatattgcctagaatataattatgactatgaaaatggctttgcaattggtccaggtggctggggtgcagctaataggctggattactcttacgatgacttcctggacactgtgcaagaaacagccacaagcatcggcaatgccaagtcctcacggattaaaagaagtgccccattatctgactataaaattaagttaatttttaacatcacagctagtgtgccattacccgatgaaagaaatgatacccttgaatgggaaaatcagcaacgactccttcagacattggaaactatcacaaataaactgaaaaggactctcaacaaagaccccatgtattcctttcagcttgcatcagaaatacttatagccgacagcaattcattagaaacaaaaaaggcttcccccttctgcagaccaggctcagtgctgagagggcgtatgtgtgtcaattgccctttgggaacctattataatctggaacatttcacctgtgaaagctgccggatcggatcctatcaagatgaagaagggcaacttgagtgcaagctttgcccctctgggatgtacacggaatatatccattcaagaaacatctctgattgtaaagctcagtgtaaacaaggcacctactcatacagtggacttgagacttgtgaatcgtgtccactgggcacttatcagccaaaatttggttcccggagctgcctctcgtgtccagaaaacacctcaactgtgaaaagaggagccgtgaacatttctgcatgtggagttccttgtccagaaggaaaattctcgcgttctgggttaatgccctgtcacccatgtcctcgtgactattaccaacctaatgcagggaaggccttctgcctggcctgtcccttttatggaactaccccattcgctggttccagatccatcacagaatgttcaagttttagttcaactttctcagcggcagaggaaagtgtggtgccccctgcctctcttggacatattaaaaagaggcatgaaatcagcagtcaggcaagtcatgaatgcttctttaacccttgccacaatagtggaacctgccagcaacttgggcgtggttatgtttgtctctgtccacttggatatacaggtttaaagtgtgaaacagacatcgatgagtgcagcccactgccttgcctcaacaatggagtttgtaaagacctagttggggaattcatttgtgagtgcccatcaggttacacaggtaagcactgtgaattgaacatcaatgaatgtcagtctaatccatgtagaaatcaggccacctgtgtggatgaattaaattcatacagttgtaaatgtcagccaggattttcaggcaaaaggtgtgaaacaggtatgtatcaactcagtgttattaataaccttaataatgcagtctgtgaagaccaggttgggggattcttgtgcaaatgcccacctggatttttgggtacccgatgtggaaagaacgtcgatgagtgtctcagtcagccatgcaaaaatggagctacctgtaaagacggtgccaatagcttcaggtgcctgtgtgcagctggcttcacaggatcacactgtgaattgaacatcaatgaatgtcagtctaatccatgtagaaatcaggccacctgtgtggatgaattaaattcatacagttgtaaatgtcagccaggattttcaggcaaaaggtgtgaaacagaacagtctacaggctttaacctggattttgaagtttctggcatctatggatatgtcatgctagatggcatgctcccatctctccatgctctaacctgtaccttctggatgaaatcctctgacgacatgaactatggaacaccaatctcctatgcagttgataacggcagcgacaataccttgctcctgactgattataacgggtgggttctttatgtgaatggcagggaaaagataacaaactgtccctcggtgaatgatggcagatggcatcatattgcaatcacttggacaagtactggtggagcctggagggtctatataaatggggaattatctgacggtggtactggcctctccattggcaaagccatacctggtggcggtgcattagttcttgggcaagagcaagacaaaaaaggagaggggttcaacccggctgagtcttttgtgggctccataagccagctcaacctctgggactatgtcctgtctccacagcaggtgaagtcactggctacctcctgcccagaggaactcagtaaaggaaacgtgttagcatggcctgatttcttgtcaggaattgtggggaaagtgaagatcgattctaagagcatattttgttctgattgcccacgcttgggagggtcagtgcctcatctgagaactgcatctgaagatttaaaaccaggttccaaagtcaatctgttctgtgaaccaggcttccagctggtcgggaaccctgtgcagtactgtctgaatcaaggacagtggacacaaccactcccccactgtgaacgcattcgctgtggggtgccacctcctttggagaatggcttccattcagccgatgacttctatgctggcagcacagtaacctaccagtgcaacaatggctactatctattgggtgactcaaggatgttctgtacagataatgggagctggaacggcgtttcaccatcctgcttagatgtcgatgagtgtgcagttggatcagattgtagtgagcatgcttcttgcctgaacgtagatggatcctacatatgttcatgtgtcccaccgtacacaggagatgggaaaaactgtgcagaacctataaaatgtaaggctccaggaaatccggaaaatggccactcctcaggtgagatttatacagtaggtgccgaagtcacattttcgtgtcaggaaggataccagttgatgggagtaaccaaaatcacatgtttggagtctggagaatggaatcatctaataccatattgtaaagctgtttcatgtggtaaaccggctattccagaaaatggttgcattgaggagttagcatttacttttggcagcaaagtgacatataggtgtaataaaggatatactctggccggtgataaagaatcatcctgtcttgctaacagttcttggagtcattcccctcctgtgtgtgaaccagtgaagtgttctagtccggaaaatataaataatggaaaatatattttgagtgggcttacctacctttctactgcatcatattcatgcgatacaggatacagcttacagggcccttccattattgaatgcacggcttctggcatctgggacagagcgccacctgcctgtcacctcgtcttctgtggagaaccacctgccatcaaagatgctgtcattacggggaataacttcactttcaggaacaccgtcacttacacttgcaaagaaggctatactcttgctggtcttgacaccattgaatgcctggccgacggcaagtggagtagaagtgaccagcagtgcctggctgtctcctgtgatgagccacccattgtggaccacgcctctccagagactgcccatcggctctttggagacattgcattctactactgctctgatggttacagcctagcagacaattcccagcttctctgcaatgcccagggcaagtgggtacccccagaaggtcaagacatgccccgttgtatagctcatttctgtgaaaaacctccatcggtttcctatagcatcttggaatctgtgagcaaagcaaaatttgcagctggctcagttgtgagctttaaatgcatggaaggctttgtactgaacacctcagcaaagattgaatgtatgagaggtgggcagtggaacccttcccccatgtccatccagtgcatccctgtgcggtgtggagagccaccaagcatcatgaatggctatgcaagtggatcaaactacagttttggagccatggtggcttacagctgcaacaaggggttctacatcaaaggggaaaagaagagcacctgcgaagccacagggcagtggagtagtcctataccgacgtgccacccggtatcttgtggtgaaccacctaaggttgagaatggctttctggagcatacaactggcaggatctttgagagtgaagtgaggtatcagtgtaacccgggctataagtcagtcggaagtcctgtatttgtctgccaagccaatcgccactggcacagtgaatcccctctgatgtgtgttcctctcgactgtggaaaacctcccccgatccagaatggcttcatgaaaggagaaaactttgaagtagggtccaaggttcagtttttctgtaatgagggttatgagcttgttggtgacagttcttggacatgtcagaaatctggcaaatggaataagaagtcaaatccaaagtgcatgcctgccaagtgcccagagccgcccctcttggaaaaccagctagtattaaaggagttgaccaccgaggtaggagttgtgacattttcctgtaaagaagggcatgtcctgcaaggcccctctgtcctgaaatgcttgccatcccagcaatggaatgactctttccctgtttgtaagattgttctttgtgccccacctcccctaatttcctttggtgtccccattccttcttctgctcttcattttggaagtactgtcaagtattcttgtgtaggtgggtttttcctaagaggaaattctaccaccctctgccaacctgatggcacctggagctctccactgccagaatgtgttccagtagaatgtccccaacctgaggaaatccccaatggaatcattgatgtgcaaggccttgcctatctcagcacagctctctatacctgcaagccaggctttgaattggtgggaaatactaccaccctttgtggagaaaatggtcactggcttggaggaaaaccaacatgtaaagccattgagtgcctgaaacccaaggagattttgaatggcaaattctcttacacggacctacactatggacagaccgttacctactcttgcaaccgaggctttcggctcgaaggtcccagtgccttgacctgtttagagacaggtgattgggatgtagatgccccatcttgcaatgccatccactgtgattccccacaacccattgaaaatggttttgtagaaggtgcagattacagctatggtgccataatcatctacagttgcttccctgggtttcaggtggctggtcatgccatgcagacctgtgaagagtcaggatggtcaagttccatcccaacatgtatgccaatagactgtggcctccctcctcatatagattttggagactgtactaaactcaaagatgaccagggatattttgagcaagaagacgacatgatggaagttccatatgtgactcctcaccctccttatcatttgggagcagtggctaaaacctgggaaaatacaaaggagtctcctgctacacattcatcaaactttctgtatggtaccatggtttcatacacctgtaatccaggatatgaacttctggggaaccctgtgctgatctgccaggaagatggaacttggaatggcagtgcaccatcctgcatttcaattgaatgtgacttgcctactgctcctgaaaatggctttttgcgttttacagagactagcatgggaagtgctgtgcagtatagctgtaaacctggacacattctagcaggctctgacttaaggctttgtctagagaatagaaagtggagtggtgcctccccacgctgtgaagccatttcatgcaaaaagccaaatccagtcatgaatggatccatcaaaggaagcaactacacatacctgagcacgttgtactatgagtgtgaccccggatatgtgctgaatggcactgagaggagaacatgccaggatgacaaaaactgggatgaggatgagcccatttgcattcctgtggactgcagttcacccccagtctcagccaatggccaggtgagaggagacgagtacacattccaaaaagagattgaatacacttgcaatgaagggttcttgcttgagggagccaggagtcgggtttgtcttgccaatggaagttggagtggagccactcccgactgtgtgcctgtcagatgtgccaccccgccacaactggccaatggggtgacggaaggcctggactatggcttcatgaaggaagtaacattccactgtcacgagggctacatcttgcacggtgctccaaaactcacctgtcagtcagatggcaactgggatgcagagattcctctctgtaaaccagtcaactgtggacctcctgaagatcttgcccatggtttccctaatggtttttcctttattcatgggggccatatacagtatcagtgctttcctggttataagctccatggaaattcatcaagaaggtgcctctccaatggctcctggagtggcagctcaccttcctgcctgccttgcagatgttccacaccagtaattgaatatggaactgtcaatgggacagattttgactgtggaaaggcagcccggattcagtgcttcaaaggcttcaagctcctaggactttctgaaatcacctgtgaagccgatggccagtggagctctgggttcccccactgtgaacacacttcttgtggttctcttccaatgataccaaatgcgttcatcagtgagaccagctcttggaaggaaaatgtgataacttacagctgcaggtctggatatgtcatacaaggcagttcagatctgatttgtacagagaaaggggtatggagccagccttatccagtctgtgagcccttgtcctgtgggtccccaccgtctgtcgccaatgcagtggcaactggagaggcacacacctatgaaagtgaagtgaaactcagatgtctggaaggttatacgatggatacagatacagatacattcacctgtcagaaagatggtcgctggttccctgagagaatctcctgcagtcctaaaaaatgtcctctcccggaaaacataacacatatacttgtacatggggacgatttcagtgtgaataggcaagtttctgtgtcatgtgcagaagggtatacctttgagggagttaacatatcagtatgtcagcttgatggaacctgggagccaccattctccgatgaatcttgcagtccagtttcttgtgggaaacctgaaagtccagaacatggatttgtggttggcagtaaatacacctttgaaagcacaattatttatcagtgtgagcctggctatgaactagaggggaacagggaacgtgtctgccaggagaacagacagtggagtggaggggtggcaatatgcaaagagaccaggtgtgaaactccacttgaatttctcaatgggaaagctgacattgaaaacaggacgactggacccaacgtggtatattcctgcaacagaggctacagtcttgaagggccatctgaggcacactgcacagaaaatggaacctggagccacccagtccctctctgcaaaccaaatccatgccctgttccttttgtgattcccgagaatgctctgctgtctgaaaaggagttttatgttgatcagaatgtgtccatcaaatgtagggaaggttttctgctgcagggccacggcatcattacctgcaaccccgacgagacgtggacacagacaagcgccaaatgtgaaaaaatctcatgtggtccaccagctcacgtagaaaatgcaattgctcgaggcgtacattatcaatatggagacatgatcacctactcatgttacagtggatacatgttggagggtttcctgaggagtgtttgtttagaaaatggaacatggacatcacctcctatttgcagagctgtctgtcgatttccatgtcagaatgggggcatctgccaacgcccaaatgcttgttcctgtccagagggctggatggggcgcctctgtgaagaaccaatctgcattcttccctgtctgaacggaggtcgctgtgtggccccttaccagtgtgactgcccgcctggctggacggggtctcgctgtcatacagctgtttgccagtctccctgcttaaatggtggaaaatgtgtaagaccaaaccgatgtcactgtctttcttcttggacgggacataactgttccaggaaaaggaggactgggttttaaccactgcacgaccatctggctctcccaaaagcaggatcatctctcctcggtagtgcctgggcatcctggaacttatgcaaagaaagtccaacatggtgctgggtcttgtttagtaaacttgttacttggggttactttttttattttgtgatatattttgttattccttgtgacatactttcttacatgtttccatttttaaatatgcctgtattttctatataaaaattatattaaatagatgctgctctaccctcacaaaatgtacatattctgctgtctattgggaaagttcctggtacacatttttattcagttacttaaaatgatttttccattaaagtatattttgctactaaataaaaaaaa

SEQ ID NO: 202 - protein, 3570 aa, Homo sapiens
MRRICAACWGLALVSGWATFQQMSPSRNFSFRLFPETAPGAPGSIPAPPAPGDEAAGSRVERLGQAFRVRLLRELSERLELVFLVDDSSSVGEVNFRSELMFVRKLLSDFPVVPTATRVAIVTFSSKNYVVPRVDYISTRRARQHKCALLLQEIPAISYRGGGTYTKGAFQQAAQILLHARENSTKVVFLITDGYSNGGDPRPIAASLRDSGVEIFTFGIWQGNIRELNDMASTPKEEHCYLLHSFEEFEALVALCHMLFVDLPSGSFIQDDMVHCSYLCDEGKDCCDRMGSCKCGKHTGHFECICEKGYNGKGLQYDCTVCPSGTYKPEGSPGGISSCIPCPDENHTSPPGSTSPEDCVCREGYRASGQTCEVVHCPALKPPENGYFIQNTCNNHFNAACGVRCHPGFDLVGSSIILCLPNGLWSGSESYCRVRTCPHLRQPKHGHISCSTREMLYKTTCLVACDEGYRLEGSDKLTCQGNSQWDGPEPRCVERHCSTFQMPKDVIISPHNCGKQPAKFGTICYVSCRQGFILSGVKEMLRCTTSGKWNVGVQAAVCKDVEAPQINCPKDIEAKTLEQQDSANVTWQIPTAKDNSGEKVSVHVHPAFTPPYLFPIGDVAIVYTATDLSGNQASCIFHIKVIDAEPPVIDWCRSPPPVQVSEKVHAASWDEPQFSDNSGAELVITRSHTQGDLFPQGETIVQYTATDPSGNNRTCDIHIVIKGSPCEIPFTPVNGDFICTPDNTGVNCTLTCLEGYDFTEGSTDKYYCAYEDGVWKPTYTTEWPDCASKRFANHGFKSFEMFYKAARCDDTDLMKKFSEAFETTLGKMVPSFCSDAEDIDCRLEENLTKKYCLEYNYDYENGFAIGPGGWGAANRLDYSYDDFLDTVQETATSIGNAKSSRIKRSAPLSDYKIKLIFNITASVPLPDERNDTLEWENQQRLLQTLETITNKLKRTLNKDPMYSFQLASEILIADSNSLETKKASPFCRPGSVLRGRMCVNCPLGTYYNLEHFTCESCRIGSYQDEEGQLECKLCPSGMYTEYIHSRNISDCKAQCKQGTYSYSGLETCESCPLGTYQPKFGSRSCLSCPENTSTVKRGAVNISACGVPCPEGKFSRSGLMPCHPCPRDYYQPNAGKAFCLACPFYGTTPFAGSRSITECSSFSSTFSAAEESVVPPASLGHIKKRHEISSQASHECFFNPCHNSGTCQQLGRGYVCLCPLGYTGLKCETDIDECSPLPCLNNGVCKDLVGEFICECPSGYTGKHCELNINECQSNPCRNQATCVDELNSYSCKCQPGFSGKRCETGMYQLSVINNLNNAVCEDQVGGFLCKCPPGFLGTRCGKNVDECLSQPCKNGATCKDGANSFRCLCAAGFTGSHCELNINECQSNPCRNQATCVDELNSYSCKCQPGFSGKRCETEQSTGFNLDFEVSGIYGYVMLDGMLPSLHALTCTFWMKSSDDMNYGTPISYAVDNGSDNTLLLTDYNGWVLYVNGREKITNCPSVNDGRWHHIAITWTSTGGAWRVYINGELSDGGTGLSIGKAIPGGGALVLGQEQDKKGEGFNPAESFVGSISQLNLWDYVLSPQQVKSLATSCPEELSKGNVLAWPDFLSGIVGKVKIDSKSIFCSDCPRLGGSVPHLRTASEDLKPGSKVNLFCEPGFQLVGNPVQYCLNQGQWTQPLPHCERIRCGVPPPLENGFHSADDFYAGSTVTYQCNNGYYLLGDSRMFCTDNGSWNGVSPSCLDVDECAVGSDCSEHASCLNVDGSYICSCVPPYTGDGKNCAEPIKCKAPGNPENGHSSGEIYTVGAEVTFSCQEGYQLMGVTKITCLESGEWNHLIPYCKAVSCGKPAIPENGCIEELAFTFGSKVTYRCNKGYTLAGDKESSCLANSSWSHSPPVCEPVKCSSPENINNGKYILSGLTYLSTASYSCDTGYSLQGPSIIECTASGIWDRAPPACHLVFCGEPPAIKDAVITGNNFTFRNTVTYTCKEGYTLAGLDTIECLADGKWSRSDQQCLAVSCDEPPIVDHASPETAHRLFGDIAFYYCSDGYSLADNSQLLCNAQGKWVPPEGQDMPRCIAHFCEKPPSVSYSILESVSKAKFAAGSVVSFKCMEGFVLNTSAKIECMRGGQWNPSPMSIQCIPVRCGEPPSIMNGYASGSNYSFGAMVAYSCNKGFYIKGEKKSTCEATGQWSSPIPTCHPVSCGEPPKVENGFLEHTTGRIFESEVRYQCNPGYKSVGSPVFVCQANRHWHSESPLMCVPLDCGKPPPIQNGFMKGENFEVGSKVQFFCNEGYELVGDSSWTCQKSGKWNKKSNPKCMPAKCPEPPLLENQLVLKELTTEVGVVTFSCKEGHVLQGPSVLKCLPSQQWNDSFPVCKIVLCAPPPLISFGVPIPSSALHFGSTVKYSCVGGFFLRGNSTTLCQPDGTWSSPLPECVPVECPQPEEIPNGIIDVQGLAYLSTALYTCKPGFELVGNTTTLCGENGHWLGGKPTCKAIECLKPKEILNGKFSYTDLHYGQTVTYSCNRGFRLEGPSALTCLETGDWDVDAPSCNAIHCDSPQPIENGFVEGADYSYGAIIIYSCFPGFQVAGHAMQTCEESGWSSSIPTCMPIDCGLPPHIDFGDCTKLKDDQGYFEQEDDMMEVPYVTPHPPYHLGAVAKTWENTKESPATHSSNFLYGTMVSYTCNPGYELLGNPVLICQEDGTWNGSAPSCISIECDLPTAPENGFLRFTETSMGSAVQYSCKPGHILAGSDLRLCLENRKWSGASPRCEAISCKKPNPVMNGSIKGSNYTYLSTLYYECDPGYVLNGTERRTCQDDKNWDEDEPICIPVDCSSPPVSANGQVRGDEYTFQKEIEYTCNEGFLLEGARSRVCLANGSWSGATPDCVPVRCATPPQLANGVTEGLDYGFMKEVTFHCHEGYILHGAPKLTCQSDGNWDAEIPLCKPVNCGPPEDLAHGFPNGFSFIHGGHIQYQCFPGYKLHGNSSRRCLSNGSWSGSSPSCLPCRCSTPVIEYGTVNGTDFDCGKAARIQCFKGFKLLGLSEITCEADGQWSSGFPHCEHTSCGSLPMIPNAFISETSSWKENVITYSCRSGYVIQGSSDLICTEKGVWSQPYPVCEPLSCGSPPSVANAVATGEAHTYESEVKLRCLEGYTMDTDTDTFTCQKDGRWFPERISCSPKKCPLPENITHILVHGDDFSVNRQVSVSCAEGYTFEGVNISVCQLDGTWEPPFSDESCSPVSCGKPESPEHGFVVGSKYTFESTIIYQCEPGYELEGNRERVCQENRQWSGGVAICKETRCETPLEFLNGKADIENRTTGPNVVYSCNRGYSLEGPSEAHCTENGTWSHPVPLCKPNPCPVPFVIPENALLSEKEFYVDQNVSIKCREGFLLQGHGIITCNPDETWTQTSAKCEKISCGPPAHVENAIARGVHYQYGDMITYSCYSGYMLEGFLRSVCLENGTWTSPPICRAVCRFPCQNGGICQRPNACSCPEGWMGRLCEEPICILPCLNGGRCVAPYQCDCPPGWTGSRCHTAVCQSPCLNGGKCVRPNRCHCLSSWTGHNCSRKRRTGF

SEQ ID NO: 203 - DNA, 11158 bp, Homo sapiens
  CDS (77)..(10786)
caattggtctagggtctcccccattggaatatccatcagtgatgagaaatacaacgtttgttgagttttctctagcatgagaagaatttgcgcggcttgctggggtctggcgctcgtttcgggctgggcgacctttcagcagatgtccccgtcgcgcaatttcagcttccgcctcttccccgagaccgcgcccggggcccccgggagtatccccgcgccgcccgctcctggcgacgaagcggcggggagcagagtggagcggctgggccaggcgttccgcgtgcggctgctgcgggagctcagcgagcgcctggagcttgtcttcctggtggatgattcgtccagcgtgggcgaagtcaacttccgcagcgagctcatgttcgtccgcaagctgctgtccgacttccccgtggtgcccacggccacgcgcgtggccatcgtgaccttctcgtccaagaactacgtggtgccgcgcgtcgattacatctccacccgccgcgcgcgccagcacaagtgcgcgctgctcctccaagagatccctgccatctcctaccgaggtggcggcacctacaccaagggcgccttccagcaagccgcgcaaattcttcttcatgctagagaaaactcaacaaaagttgtatttctcatcactgatggatattccaatgggggagaccctagaccaattgcagcgtcactgcgagattcaggagtggagatcttcacttttggcatatggcaagggaacattcgagagctgaatgacatggcttccaccccaaaggaggagcactgttacctgctacacagttttgaagaatttgaggctttagtcgccctctgtcatatgttatttgtagatctaccttctgggagttttattcaagatgatatggtccactgctcatatctttgtgatgaaggcaaggactgctgtgaccgaatgggaagctgcaaatgtgggaaacacacaggccattttgagtgcatctgtgaaaaggggtataacgggaaaggtctgcagtatgactgcacagtttgcccatcggggacatacaaacctgaaggctcaccaggaggaatcagcagttgcattccatgtcctgatgaaaatcacacctctccacctggaagcacatcccctgaagactgtgtctgcagagagggatacagggcatctggccagacctgtgaagttgtccactgccctgccctgaagcctcccgaaaatggttactttatccaaaacacttgcaacaaccacttcaatgcagcctgtggggtccgatgtcaccctggatttgatcttgtgggaagcagcatcatcttatgtctacccaatggtttgtggtccggttcagagagctactgcagagtaagaacatgtcctcatctccgccagccgaaacatggccacatcagctgttctacaagggaaatgttatataagacaacatgtttggttgcctgtgatgaagggtacaggctagaaggcagtgataagcttacttgtcaaggaaacagccagtgggatgggccagaaccccggtgtgtggagcgccactgttccacctttcagatgcccaaagatgtcatcatatccccccacaactgtggcaagcagccagccaaatttgggacgatctgctatgtaagttgccgccaagggttcattttatctggagtcaaagaaatgctgagatgtaccacttctggaaaatggaatgtcggagttcaggcagctgtgtgtaaagacgtggaggctcctcaaatcaactgtcctaaggacatagaggctaagactctggaacagcaagattctgccaatgttacctggcagattccaacagctaaagacaactctggtgaaaaggtgtcagtccacgttcatccagctttcaccccaccttaccttttcccaattggagatgttgctatcgtatacacggcaactgacctatccggcaaccaggccagctgcattttccatatcaaggttattgatgcagaaccacctgtcatagactggtgcagatctccacctcccgtccaggtctcggagaaggtacatgccgcaagctgggatgagcctcagttctcagacaactcaggtgctgaattggtcattaccagaagtcatacacaaggagaccttttccctcaaggggagactatagtacagtatacagccactgacccctcaggcaataacaggacatgtgatatccatattgtcataaaaggttctccctgtgaaattccattcacacctgtaaatggggattttatatgcactccagataatactggagtcaactgtacattaacttgcttggagggctatgatttcacagaagggtctactgacaagtattattgtgcttatgaagatggcgtctggaaaccaacatataccactgaatggccagactgtgccagtaagcgttttgcaaaccacgggttcaagtcctttgagatgttctacaaagcagctcgttgtgatgacacagatctgatgaagaagttttctgaagcatttgagacgaccctgggaaaaatggtcccatcattttgtagtgatgcagaggacattgactgcagactggaggagaacctgaccaaaaaatattgcctagaatataattatgactatgaaaatggctttgcaattggtccaggtggctggggtgcagctaataggctggattactcttacgatgacttcctggacactgtgcaagaaacagccacaagcatcggcaatgccaagtcctcacggattaaaagaagtgccccattatctgactataaaattaagttaatttttaacatcacagctagtgtgccattacccgatgaaagaaatgatacccttgaatgggaaaatcagcaacgactccttcagacattggaaactatcacaaataaactgaaaaggactctcaacaaagaccccatgtattcctttcagcttgcatcagaaatacttatagccgacagcaattcattagaaacaaaaaaggcttcccccttctgcagaccaggctcagtgctgagagggcgtatgtgtgtcaattgccctttgggaacctattataatctggaacatttcacctgtgaaagctgccggatcggatcctatcaagatgaagaagggcaacttgagtgcaagctttgcccctctgggatgtacacggaatatatccattcaagaaacatctctgattgtaaagctcagtgtaaacaaggcacctactcatacagtggacttgagacttgtgaatcgtgtccactgggcacttatcagccaaaatttggttcccggagctgcctctcgtgtccagaaaacacctcaactgtgaaaagaggagccgtgaacatttctgcatgtggagttccttgtccagaaggaaaattctcgcgttctgggttaatgccctgtcacccatgtcctcgtgactattaccaacctaatgcagggaaggccttctgcctggcctgtcccttttatggaactaccccattcgctggttccagatccatcacagaatgttcaagttttagttcaactttctcagcggcagaggaaagtgtggtgccccctgcctctcttggacatattaaaaagaggcatgaaatcagcagtcaggcaagtcatgaatgcttctttaacccttgccacaatagtggaacctgccagcaacttgggcgtggttatgtttgtctctgtccacttggatatacaggtttaaagtgtgaaacagacatcgatgagtgcagcccactgccttgcctcaacaatggagtttgtaaagacctagttggggaattcatttgtgagtgcccatcaggttacacaggtaagcactgtgaattgaacatcaatgaatgtcagtctaatccatgtagaaatcaggccacctgtgtggatgaattaaattcatacagttgtaaatgtcagccaggattttcaggcaaaaggtgtgaaacaggtatgtatcaactcagtgttattaataaccttaataatgcagtctgtgaagaccaggttgggggattcttgtgcaaatgcccacctggatttttgggtacccgatgtggaaagaacgtcgatgagtgtctcagtcagccatgcaaaaatggagctacctgtaaagacggtgccaatagcttcaggtgcctgtgtgcagctggcttcacaggatcacactgtgaattgaacatcaatgaatgtcagtctaatccatgtagaaatcaggccacctgtgtggatgaattaaattcatacagttgtaaatgtcagccaggattttcaggcaaaaggtgtgaaacagaacagtctacaggctttaacctggattttgaagtttctggcatctatggatatgtcatgctagatggcatgctcccatctctccatgctctaacctgtaccttctggatgaaatcctctgacgacatgaactatggaacaccaatctcctatgcagttgataacggcagcgacaataccttgctcctgactgattataacgggtgggttctttatgtgaatggcagggaaaagataacaaactgtccctcggtgaatgatggcagatggcatcatattgcaatcacttggacaagtactggtggagcctggagggtctatataaatggggaattatctgacggtggtactggcctctccattggcaaagccatacctggtggcggtgcattagttcttgggcaagagcaagacaaaaaaggagaggggttcaacccggctgagtcttttgtgggctccataagccagctcaacctctgggactatgtcctgtctccacagcaggtgaagtcactggctacctcctgcccagaggaactcagtaaaggaaacgtgttagcatggcctgatttcttgtcaggaattgtggggaaagtgaagatcgattctaagagcatattttgttctgattgcccacgcttgggagggtcagtgcctcatctgagaactgcatctgaagatttaaaaccaggttccaaagtcaatctgttctgtgaaccaggcttccagctggtcgggaaccctgtgcagtactgtctgaatcaaggacagtggacacaaccactcccccactgtgaacgcattcgctgtggggtgccacctcctttggagaatggcttccattcagccgatgacttctatgctggcagcacagtaacctaccagtgcaacaatggctactatctattgggtgactcaaggatgttctgtacagataatgggagctggaacggcgtttcaccatcctgcttagatgtcgatgagtgtgcagttggatcagattgtagtgagcatgcttcttgcctgaacgtagatggatcctacatatgttcatgtgtcccaccgtacacaggagatgggaaaaactgtgcagaacctataaaatgtaaggctccaggaaatccggaaaatggccactcctcaggtgagatttatacagtaggtgccgaagtcacattttcgtgtcaggaaggataccagttgatgggagtaaccaaaatcacatgtttggagtctggagaatggaatcatctaataccatattgtaaagctgtttcatgtggtaaaccggctattccagaaaatggttgcattgaggagttagcatttacttttggcagcaaagtgacatataggtgtaataaaggatatactctggccggtgataaagaatcatcctgtcttgctaacagttcttggagtcattcccctcctgtgtgtgaaccagtgaagtgttctagtccggaaaatataaataatggaaaatatattttgagtgggcttacctacctttctactgcatcatattcatgcgatacaggatacagcttacagggcccttccattattgaatgcacggcttctggcatctgggacagagcgccacctgcctgtcacctcgtcttctgtggagaaccacctgccatcaaagatgctgtcattacggggaataacttcactttcaggaacaccgtcacttacacttgcaaagaaggctatactcttgctggtcttgacaccattgaatgcctggccgacggcaagtggagtagaagtgaccagcagtgcctggctgtctcctgtgatgagccacccattgtggaccacgcctctccagagactgcccatcggctctttggagacattgcattctactactgctctgatggttacagcctagcagacaattcccagcttctctgcaatgcccagggcaagtgggtacccccagaaggtcaagacatgccccgttgtatagctcatttctgtgaaaaacctccatcggtttcctatagcatcttggaatctgtgagcaaagcaaaatttgcagctggctcagttgtgagctttaaatgcatggaaggctttgtactgaacacctcagcaaagattgaatgtatgagaggtgggcagtggaacccttcccccatgtccatccagtgcatccctgtgcggtgtggagagccaccaagcatcatgaatggctatgcaagtggatcaaactacagttttggagccatggtggcttacagctgcaacaaggggttctacatcaaaggggaaaagaagagcacctgcgaagccacagggcagtggagtagtcctataccgacgtgccacccggtatcttgtggtgaaccacctaaggttgagaatggctttctggagcatacaactggcaggatctttgagagtgaagtgaggtatcagtgtaacccgggctataagtcagtcggaagtcctgtatttgtctgccaagccaatcgccactggcacagtgaatcccctctgatgtgtgttcctctcgactgtggaaaacctcccccgatccagaatggcttcatgaaaggagaaaactttgaagtagggtccaaggttcagtttttctgtaatgagggttatgagcttgttggtgacagttcttggacatgtcagaaatctggcaaatggaataagaagtcaaatccaaagtgcatgcctgccaagtgcccagagccgcccctcttggaaaaccagctagtattaaaggagttgaccaccgaggtaggagttgtgacattttcctgtaaagaagggcatgtcctgcaaggcccctctgtcctgaaatgcttgccatcccagcaatggaatgactctttccctgtttgtaagattgttctttgtaccccacctcccctaatttcctttggtgtccccattccttcttctgctcttcattttggaagtactgtcaagtattcttgtgtaggtgggtttttcctaagaggaaattctaccaccctctgccaacctgatggcacctggagctctccactgccagaatgtgttccagtagaatgtccccaacctgaggaaatccccaatggaatcattgatgtgcaaggccttgcctatctcagcacagctctctatacctgcaagccaggctttgaattggtgggaaatactaccaccctttgtggagaaaatggtcactggcttggaggaaaaccaacatgtaaagccattgagtgcctgaaacccaaggagattttgaatggcaaattctcttacacggacctacactatggacagaccgttacctactcttgcaaccgaggctttcggctcgaaggtcccagtgccttgacctgtttagagacaggtgattgggatgtagatgccccatcttgcaatgccatccactgtgattccccacaacccattgaaaatggttttgtagaaggtgcagattacagctatggtgccataatcatctacagttgcttccctgggtttcaggtggctggtcatgccatgcagacctgtgaagagtcaggatggtcaagttccatcccaacatgtatgccaatagactgtggcctccctcctcatatagattttggagactgtactaaactcaaagatgaccagggatattttgagcaagaagacgacatgatggaagttccatatgtgactcctcaccctccttatcatttgggagcagtggctaaaacctgggaaaatacaaaggagtctcctgctacacattcatcaaactttctgtatggtaccatggtttcatacacctgtaatccaggatatgaacttctggggaaccctgtgctgatctgccaggaagatggaacttggaatggcagtgcaccatcctgcatttcaattgaatgtgacttgcctactgctcctgaaaatggctttttgcgttttacagagactagcatgggaagtgctgtgcagtatagctgtaaacctggacacattctagcaggctctgacttaaggctttgtctagagaatagaaagtggagtggtgcctccccacgctgtgaagccatttcatgcaaaaagccaaatccagtcatgaatggatccatcaaaggaagcaactacacatacctgagcacgttgtactatgagtgtgaccccggatatgtgctgaatggcactgagaggagaacatgccaggatgacaaaaactgggatgaggatgagcccatttgcattcctgtggactgcagttcacccccagtctcagccaatggccaggtgagaggagacgagtacacattccaaaaagagattgaatacacttgcaatgaagggttcttgcttgagggagccaggagtcgggtttgtcttgccaatggaagttggagtggagccactcccgactgtgtgcctgtcagatgtgccaccccgccacaactggccaatggggtgacggaaggcctggactatggcttcatgaaggaagtaacattccactgtcacgagggctacatcttgcacggtgctccaaaactcacctgtcagtcagatggcaactgggatgcagagattcctctctgtaaaccagtcaactgtggacctcctgaagatcttgcccatggtttccctaatggtttttcctttattcatgggggccatatacagtatcagtgctttcctggttataagctccatggaaattcatcaagaaggtgcctctccaatggctcctggagtggcagctcaccttcctgcctgccttgcagatgttccacaccagtaattgaatatggaactgtcaatgggacagattttgactgtggaaaggcagcccggattcagtgcttcaaaggcttcaagctcctaggactttctgaaatcacctgtgaagccgatggccagtggagctctgggttcccccactgtgaacacacttcttgtggttctcttccaatgataccaaatgcgttcatcagtgagaccagctcttggaaggaaaatgtgataacttacagctgcaggtctggatatgtcatacaaggcagttcagatctgatttgtacagagaaaggggtatggagccagccttatccagtctgtgagcccttgtcctgtgggtccccaccgtctgtcgccaatgcagtggcaactggagaggcacacacctatgaaagtgaagtgaaactcagatgtctggaaggttatacgatggatacagatacagatacattcacctgtcagaaagatggtcgctggttccctgagagaatctcctgcagtcctaaaaaatgtcctctcccggaaaacataacacatatacttgttcatggggacgatttcagtgtgaataggcaagtttctgtgtcatgtgcagaagggtatacctttgagggagttaacatatcagtatgtcagcttgatggaacctgggagccaccattctccgatgaatcttgcagtccagtttcttgtgggaaacctgaaagtccagaacatggatttgtggttggcagtaaatacacctttgaaagcacaattatttatcagtgtgagcctggctatgaactagaggggaacagggaacgtgtctgccaggagaacagacagtggagtggaggggtggcaatatgcaaagagaccaggtgtgaaactccacttgaatttctcaatgggaaagctgacattgaaaacaggacgactggacccaacgtggtatattcctgcaacagaggctacagtcttgaagggccatctgaggcacactgcacagaaaatggaacctggagccacccagtccctctctgcaaaccaaatccatgccctgttccttttgtgattcccgagaatgctctgctgtctgaaaaggagttttatgttgatcagaatgtgtccatcaaatgtagggaaggttttctgctgcagggccacggcatcattacctgcaaccccgacgagacgtggacacagacaagcgccaaatgtgaaaaaatctcatgtggtccaccagctcacgtagaaaatgcaattgctcgaggcgtacattatcaatatggagacatgatcacctactcatgttacagtggatacatgttggagggtttcctgaggagtgtttgtttagaaaatggaacatggacatcacctcctatttgcagagctgtctgtcgatttccatgtcagaatgggggcatctgccaacgcccaaatgcttgttcctgtccagagggctggatggggcgcctctgtgaagaaccaatctgcattcttccctgtctgaacggaggtcgctgtgtggccccttaccagtgtgactgcccgcctggctggacggggtctcgctgtcatacagctgtttgccagtctccctgcttaaatggtggaaaatgtgtaagaccaaaccgatgtcactgtctttcttcttggacgggacataactgttccaggaaaaggaggactgggttttaaccactgcacgaccatctggctctcccaaaagcaggatcatctctcctcggtagtgcctgggcatcctggaacttatgcaaagaaagtccaacatggtgctgggtcttgtttagtaaacttgttacttggggttactttttttattttgtgatatattttgttattccttgtgacatactttcttacatgtttccatttttaaatatgcctgtattttctatataaaaattatattaaatagatgctgctctaccctcacaaaatgtacatattctgctgtctattgggaaagttcctggtacacatttttattcagttacttaaaatgatttttccattaaagtatattttgctactaaataaaaaaaa

SEQ ID NO: 204 - protein, 3570 aa, Homo sapiens; identical to SEQ ID NO: 178

SEQ ID NO: 205 - DNA, 11158 bp, Homo sapiens
  CDS (77)..(10786)
caattggtctagggtctcccccattggaatatccatcagtgatgagaaatacaacgtttgttgagttttctctagcatgagaagaatttgcgcggcttgctggggtctggcgctcgtttcgggctgggcgacctttcagcagatgtccccgtcgcgcaatttcagcttccgcctcttccccgagaccgcgcccggggcccccgggagtatccccgcgccgcccgctcctggcgacgaagcggcggggagcagagtggagcggctgggccaggcgttccgcgtgcggctgctgcgggagctcagcgagcgcctggagcttgtcttcctggtggatgattcgtccagcgtgggcgaagtcaacttccgcagcgagctcatgttcgtccgcaagctgctgtccgacttccccgtggtgcccacggccacgcgcgtggccatcgtgaccttctcgtccaagaactacgtggtgccgcgcgtcgattacatctccacccgccgcgcgcgccagcacaagtgcgcgctgctcctccaagagatccctgccatctcctaccgaggtggcggcacctacaccaagggcgccttccagcaagccgcgcaaattcttcttcatgctagagaaaactcaacaaaagttgtatttctcatcactgatggatattccaatgggggagaccctagaccaattgcagcgtcactgcgagattcaggagtggagatcttcacttttggcatatggcaagggaacattcgagagctgaatgacatggcttccaccccaaaggaggagcactgttacctgctacacagttttgaagaatttgaggctttagtcgccctctgtcatatgttatttgtagatctaccttctgggagttttattcaagatgatatggtccactgctcatatctttgtgatgaaggcaaggactgctgtgaccgaatgggaagctgcaaatgtgggaaacacacaggccattttgagtgcatctgtgaaaaggggtataacgggaaaggtctgcagtatgactgcacagtttgcccatcggggacatacaaacctgaaggctcaccaggaggaatcagcagttgcattccatgtcctgatgaaaatcacacctctccacctggaagcacatcccctgaagactgtgtctgcagagagggatacagggcatctggccagacctgtgaagttgtccactgccctgccctgaagcctcccgaaaatggttactttatccaaaacacttgcaacaaccacttcaatgcagcctgtggggtccgatgtcaccctggatttgatcttgtgggaagcagcatcatcttatgtctacccaatggtttgtggtccggttcagagagctactgcagagtaagaacatgtcctcatctccgccagccgaaacatggccacatcagctgttctacaagggaaatgttatataagacaacatgtttggttgcctgtgatgaagggtacaggctagaaggcagtgataagcttacttgtcaaggaaacagccagtgggatgggccagaaccccggtgtgtggagcgccactgttccacctttcagatgcccaaagatgtcatcatatccccccacaactgtggcaagcagccagccaaatttgggacgatctgctatgtaagttgccgccaagggttcattttatctggagtcaaagaaatgctgagatgtaccacttctggaaaatggaatgtcggagttcaggcagctgtgtgtaaagacgtggaggctcctcaaatcaactgtcctaaggacatagaggctaagactctggaacagcaagattctgccaatgttacctggcagattccaacagctaaagacaactctggtgaaaaggtgtcagtccacgttcatccagctttcaccccaccttaccttttcccaattggagatgttgctatcgtatacacggcaactgacctatccggcaaccaggccagctgcattttccatatcaaggttattgatgcagaaccacctgtcatagactggtgcagatctccacctcccgtccaggtctcggagaaggtacatgccgcaagctgggatgagcctcagttctcagacaactcaggtgctgaattggtcattaccagaagtcatacacaaggagaccttttccctcaaggggagactatagtacagtatacagccactgacccctcaggcaataacaggacatgtgatatccatattgtcataaaaggttctccctgtgaaattccattcacacctgtaaatggggattttatatgcactccagataatactggagtcaactgtacattaacttgcttggagggctatgatttcacagaagggtctactgacaagtattattgtgcttatgaagatggcgtctggaaaccaacatataccactgaatggccagactgtgccagtaagcgttttgcaaaccacgggttcaagtcctttgagatgttctacaaagcagctcgttgtgatgacacagatctgatgaagaagttttctgaagcatttgagacgaccctgggaaaaatggtcccatcattttgtagtgatgcagaggacattgactgcagactggaggagaacctgaccaaaaaatattgcctagaatataattatgactatgaaaatggctttgcaattggtccaggtggctggggtgcagctaataggctggattactcttacgatgacttcctggacactgtgcaagaaacagccacaagcatcggcaatgccaagtcctcacggattaaaagaagtgccccattatctgactataaaattaagttaatttttaacatcacagctagtgtgccattacccgatgaaagaaatgatacccttgaatgggaaaatcagcaacgactccttcagacattggaaactatcacaaataaactgaaaaggactctcaacaaagaccccatgtattcctttcagcttgcatcagaaatacttatagccgacagcaattcattagaaacaaaaaaggcttcccccttctgcagaccaggctcagtgctgagagggcgtatgtgtgtcaattgccctttgggaacctattataatctggaacatttcacctgtgaaagctgccggatcggatcctatcaagatgaagaagggcaacttgagtgcaagctttgcccctctgggatgtacacggaatatatccattcaagaaacatctctgattgtaaagctcagtgtaaacaaggcacctactcatacagtggacttgagacttgtgaatcgtgtccactgggcacttatcagccaaaatttggttcccggagctgcctctcgtgtccagaaaacacctcaactgtgaaaagaggagccgtgaacatttctgcatgtggagttccttgtccagaaggaaaattctcgcgttctgggttaatgccctgtcacccatgtcctcgtgactattaccaacctaatgcagggaaggccttctgcctggcctgtcccttttatggaactaccccattcgctggttccagatccatcacagaatgttcaagttttagttcaactttctcagcggcagaggaaagtgtggtgccccctgcctctcttggacatattaaaaagaggcatgaaatcagcagtcaggcaagtcatgaatgcttctttaacccttgccacaatagtggaacctgccagcaacttgggcgtggttatgtttgtctctgtccacttggatatacaggtttaaagtgtgaaacagacatcgatgagtgcagcccactgccttgcctcaacaatggagtttgtaaagacctagttggggaattcatttgtgagtgcccatcaggttacacaggtaagcactgtgaattgaacatcaatgaatgtcagtctaatccatgtagaaatcaggccacctgtgtggatgaattaaattcatacagttgtaaatgtcagccaggattttcaggcaaaaggtgtgaaacaggtatgtatcaactcagtgttattaataaccttaataatgcagtctgtgaagaccaggttgggggattcttgtgcaaatgcccacctggatttttgggtacccgatgtggaaagaacgtcgatgagtgtctcagtcagccatgcaaaaatggagctacctgtaaagacggtgccaatagcttcaggtgcctgtgtgcagctggcttcacaggatcacactgtgaattgaacatcaatgaatgtcagtctaatccatgtagaaatcaggccacctgtgtggatgaattaaattcatacagttgtaaatgtcagccaggattttcaggcaaaaggtgtgaaacagaacagtctacaggctttaacctggattttgaagtttctggcatctatggatatgtcatgctagatggcatgctcccatctctccatgctctaacctgtaccttctggatgaaatcctctgacgacatgaactatggaacaccaatctcctatgcagttgataacggcagcgacaataccttgctcctgactgattataacgggtgggttctttatgtgaatggcagggaaaagataacaaactgtccctcggtgaatgatggcagatggcatcatattgcaatcacttggacaagtactggtggagcctggagggtctatataaatggggaattatctgacggtggtactggcctctccattggcaaagccatacctggtggcggtgcattagttcttgggcaagagcaagacaaaaaaggagaggggttcaacccggctgagtcttttgtgggctccataagccagctcaacctctgggactatgtcctgtctccacagcaggtgaagtcactggctacctcctgcccagaggaactcagtaaaggaaacgtgttagcatggcctgatttcttgtcaggaattgtggggaaagtgaagatcgattctaagagcatattttgttctgattgcccacgcttgggagggtcagtgcctcatctgagaactgcatctgaagatttaaaaccaggttccaaagtcaatctgttctgtgaaccaggcttccagctggtcgggaaccctgtgcagtactgtctgaatcaaggacagtggacacaaccactcccccactgtgaacgcattcgctgtggggtgccacctcctttggagaatggcttccattcagccgatgacttctatgctggcagcacagtaacctaccagtgcaacaatggctactatctattgggtgactcaaggatgttctgtacagataatgggagctggaacggcgtttcaccatcctgcttagatgtcgatgagtgtgcagttggatcagattgtagtgagcatgcttcttgcctgaacgtagatggatcctacatatgttcatgtgtcccaccgtacacaggagatgggaaaaactgtgcagaacctataaaatgtaaggctccaggaaatccggaaaatggccactcctcaggtgagatttatacagtaggtgccgaagtcacattttcgtgtcaggaaggataccagttgatgggagtaaccaaaatcacatgtttggagtctggagaatggaatcatctaataccatattgtaaagctgtttcatgtggtaaaccggctattccagaaaatggttgcattgaggagttagcatttacttttggcagcaaagtgacatataggtgtaataaaggatatactctggccggtgataaagaatcatcctgtcttgctaacagttcttggagtcattcccctcctgtgtgtgaaccagtgaagtgttctagtccggaaaatataaataatggaaaatatattttgagtgggcttacctacctttctactgcatcatattcatgcgatacaggatacagcttacagggcccttccattattgaatgcacggcttctggcatctgggacagagcgccacctgcctgtcacctcgtcttctgtggagaaccacctgccatcaaagatgctgtcattacggggaataacttcactttcaggaacaccgtcacttacacttgcaaagaaggctatactcttgctggtcttgacaccattgaatgcctggccgacggcaagtggagtagaagtgaccagcagtgcctggctgtctcctgtgatgagccacccattgtggaccacgcctctccagagactgcccatcggctctttggagacattgcattctactactgctctgatggttacagcctagcagacaattcccagcttctctgcaatgcccagggcaagtgggtacccccagaaggtcaagacatgccccgttgtatagctcatttctgtgaaaaacctccatcggtttcctatagcatcttggaatctgtgagcaaagcaaaatttgcagctggctcagttgtgagctttaaatgcatggaaggctttgtactgaacacctcagcaaagattgaatgtatgagaggtgggcagtggaacccttcccccatgtccatccagtgcatccctgtgcggtgtggagagccaccaagcatcatgaatggctatgcaagtggatcaaactacagttttggagccatggtggcttacagctgcaacaaggggttctacatcaaaggggaaaagaagagcacctgcgaagccacagggcagtggagtagtcctataccgacgtgccacccggtatcttgtggtgaaccacctaaggttgagaatggctttctggagcatacaactggcaggatctttgagagtgaagtgaggtatcagtgtaacccgggctataagtcagtcggaagtcctgtatttgtctgccaagccaatcgccactggcacagtgaatcccctctgatgtgtgttcctctcgactgtggaaaacctcccccgatccagaatggcttcatgaaaggagaaaactttgaagtagggtccaaggttcagtttttctgtaatgagggttatgagcttgttggtgacagttcttggacatgtcagaaatctggcaaatggaataagaagtcaaatccaaagtgcatgcctgccaagtgcccagagccgcccctcttggaaaaccagctagtattaaaggagttgaccaccgaggtaggagttgtgacattttcctgtaaagaagggcatgtcctgcaaggcccctctgtcctgaaatgcttgccatcccagcaatggaatgactctttccctgtttgtaagattgttctttgtaccccacctcccctaatttcctttggtgtccccattccttcttctgctcttcattttggaagtactgtcaagtattcttgtgtaggtgggtttttcctaagaggaaattctaccaccctctgccaacctgatggcacctggagctctccactgccagaatgtgttccagtagaatgtccccaacctgaggaaatccccaatggaatcattgatgtgcaaggccttgcctatctcagcacagctctctatacctgcaagccaggctttgaattggtgggaaatactaccaccctttgtggagaaaatggtcactggcttggaggaaaaccaacatgtaaagccattgagtgcctgaaacccaaggagattttgaatggcaaattctcttacacggacctacactatggacagaccgttacctactcttgcaaccgaggctttcggctcgaaggtcccagtgccttgacctgtttagagacaggtgattgggatgtagatgccccatcttgcaatgccatccactgtgattccccacaacccattgaaaatggttttgtagaaggtgcagattacagctatggtgccataatcatctacagttgcttccctgggtttcaggtggctggtcatgccatgcagacctgtgaagagtcaggatggtcaagttccatcccaacatgtatgccaatagactgtggcctccctcctcatatagattttggagactgtactaaactcaaagatgaccagggatattttgagcaagaagacgacatgatggaagttccatatgtgactcctcaccctccttatcatttgggagcagtggctaaaacctgggaaaatacaaaggagtctcctgctacacattcatcaaactttctgtatggtaccatggtttcatacacctgtaatccaggatatgaacttctggggaaccctgtgctgatctgccaggaagatggaacttggaatggcagtgcaccatcctgcatttcaattgaatgtgacttgcctactgctcctgaaaatggctttttgcgttttacagagactagcatgggaagtgctgtgcagtatagctgtaaacctggacacattctagcaggctctgacttaaggctttgtctagagaatagaaagtggagtggtgcctccccacgctgtgaagccatttcatgcaaaaagccaaatccagtcatgaatggatccatcaaaggaagcaactacacatacctgagcacgttgtactatgagtgtgaccccggatatgtgctgaatggcactgagaggagaacatgccaggatgacaaaaactgggatgaggatgagcccatttgcattcctgtggactgcagttcacccccagtctcagccaatggccaggtgagaggagacgagtacacattccaaaaagagattgaatacacttgcaatgaagggttcttgcttgagggagccaggagtcgggtttgtcttgccaatggaagttggagtggagccactcccgactgtgtgcctgtcagatgtgccaccccgccacaactggccaatggggtgacggaaggcctggactatggcttcatgaaggaagtaacattccactgtcacgagggctacatcttgcacggtgctccaaaactcacctgtcagtcagatggcaactgggatgcagagattcctctctgtaaaccagtcaactgtggacctcctgaagatcttgcccatggtttccctaatggtttttcctttattcatgggggccatatacagtatcagtgctttcctggttataagctccatggaaattcatcaagaaggtgcctctccaatggctcctggagtggcagctcaccttcctgcctgccttgcagatgttccacaccagtaattgaatatggaactgtcaatgggacagattttgactgtggaaaggcagcccggattcagtgcttcaaaggcttcaagctcctaggactttctgaaatcacctgtgaagccgatggccagtggagctctgggttcccccactgtgaacacacttcttgtggttctcttccaatgataccaaatgcgttcatcagtgagaccagctcttggaaggaaaatgtgataacttacagctgcaggtctggatatgtcatacaaggcagttcagatctgatttgtacagagaaaggggtatggagccagccttatccagtctgtgagcccttgtcctgtgggtccccaccgtctgtcgccaatgcagtggcaactggagaggcacacacctatgaaagtgaagtgaaactcagatgtctggaaggttatacgatggatacagatacagatacattcacctgtcagaaagatggtcgctggttccctgagagaatctcctgcagtcctaaaaaatgtcctctcccggaaaacataacacatatacttgtacatggggacgatttcagtgtgaataggcaagtttctgtgtcatgtgcagaagggtatacctttgagggagttaacatatcagtatgtcagcttgatggaacctgggagccaccattctccgatgaatcttgcagtccagtttcttgtgggaaacctgaaagtccagaacatggatttgtggttggcagtaaatacacctttgaaagcacaattatttatcagtgtgagcctggctatgaactagaggggaacagggaacgtgtctgccaggagaacagacagtggagtggaggggtggcaatatgcaaagagaccaggtgtgaaactccacttgaatttctcaatgggaaagctgacattgaaaacaggacgactggacccaacgtggtatattcctgcaacagaggctacagtcttgaagggccatctgaggcacactgcacagaaaatggaacctggagccacccagtccctctctgcaaaccaaatccatgccctgttccttttgtgattcccgagaatgctctgctgtctgaaaaggagttttatgttgatcagaatgtgtccatcaaatgtagggaaggttttctgctgcagggccacggcatcattacctgcaaccccgacgagacgtggacacagacaagcgccaaatgtgaaaaaatctcatgtggtccaccagctcacgtagaaaatgcaattgctcgaggcgtacattatcaatatggagacatgatcacctactcatgttacagtggatacatgttggagggtttcctgaggagtgtttgtttagaaaatggaacatggacatcacctcctatttgcagagctgtctgtcgatttccatgtcagaatgggggcatctgccaacgcccaaatgcttgttcctgtccagagggctggatggggcgcctctgtgaagaaccaatctgcattcttccctgtctgaacggaggtcgctgtgtggccccttaccagtgtgactgcccgcctggctggacggggtctcgctgtcatacagctgtttgccagtctccctgcttaaatggtggaaaatgtgtaagaccaaaccgatgtcactgtctttcttcttggatgggacataactgttccaggaaaaggaggactgggttttaaccactgcacgaccatctggctctcccaaaagcaggatcatctctcctcggtagtgcctgggcatcctggaacttatgcaaagaaagtccaacatggtgctgggtcttgtttagtaaacttgttacttggggttactttttttattttgtgatatattttgttattccttgtgacatactttcttacatgtttccatttttaaatatgcctgtattttctatataaaaattatattaaatagatgctgctctaccctcacaaaatgtacatattctgctgtctattgggaaagttcctggtacacatttttattcagttacttaaaatgatttttccattaaagtatattttgctactaaataaaaaaaa

SEQ ID NO: 206 - protein, 3570 aa, Homo sapiens
MRRICAACWGLALVSGWATFQQMSPSRNFSFRLFPETAPGAPGSIPAPPAPGDEAAGSRVERLGQAFRVRLLRELSERLELVFLVDDSSSVGEVNFRSELMFVRKLLSDFPVVPTATRVAIVTFSSKNYVVPRVDYISTRRARQHKCALLLQEIPAISYRGGGTYTKGAFQQAAQILLHARENSTKVVFLITDGYSNGGDPRPIAASLRDSGVEIFTFGIWQGNIRELNDMASTPKEEHCYLLHSFEEFEALVALCHMLFVDLPSGSFIQDDMVHCSYLCDEGKDCCDRMGSCKCGKHTGHFECICEKGYNGKGLQYDCTVCPSGTYKPEGSPGGISSCIPCPDENHTSPPGSTSPEDCVCREGYRASGQTCEVVHCPALKPPENGYFIQNTCNNHFNAACGVRCHPGFDLVGSSIILCLPNGLWSGSESYCRVRTCPHLRQPKHGHISCSTREMLYKTTCLVACDEGYRLEGSDKLTCQGNSQWDGPEPRCVERHCSTFQMPKDVIISPHNCGKQPAKFGTICYVSCRQGFILSGVKEMLRCTTSGKWNVGVQAAVCKDVEAPQINCPKDIEAKTLEQQDSANVTWQIPTAKDNSGEKVSVHVHPAFTPPYLFPIGDVAIVYTATDLSGNQASCIFHIKVIDAEPPVIDWCRSPPPVQVSEKVHAASWDEPQFSDNSGAELVITRSHTQGDLFPQGETIVQYTATDPSGNNRTCDIHIVIKGSPCEIPFTPVNGDFICTPDNTGVNCTLTCLEGYDFTEGSTDKYYCAYEDGVWKPTYTTEWPDCASKRFANHGFKSFEMFYKAARCDDTDLMKKFSEAFETTLGKMVPSFCSDAEDIDCRLEENLTKKYCLEYNYDYENGFAIGPGGWGAANRLDYSYDDFLDTVQETATSIGNAKSSRIKRSAPLSDYKIKLIFNITASVPLPDERNDTLEWENQQRLLQTLETITNKLKRTLNKDPMYSFQLASEILIADSNSLETKKASPFCRPGSVLRGRMCVNCPLGTYYNLEHFTCESCRIGSYQDEEGQLECKLCPSGMYTEYIHSRNISDCKAQCKQGTYSYSGLETCESCPLGTYQPKFGSRSCLSCPENTSTVKRGAVNISACGVPCPEGKFSRSGLMPCHPCPRDYYQPNAGKAFCLACPFYGTTPFAGSRSITECSSFSSTFSAAEESVVPPASLGHIKKRHEISSQASHECFFNPCHNSGTCQQLGRGYVCLCPLGYTGLKCETDIDECSPLPCLNNGVCKDLVGEFICECPSGYTGKHCELNINECQSNPCRNQATCVDELNSYSCKCQPGFSGKRCETGMYQLSVINNLNNAVCEDQVGGFLCKCPPGFLGTRCGKNVDECLSQPCKNGATCKDGANSFRCLCAAGFTGSHCELNINECQSNPCRNQATCVDELNSYSCKCQPGFSGKRCETEQSTGFNLDFEVSGIYGYVMLDGMLPSLHALTCTFWMKSSDDMNYGTPISYAVDNGSDNTLLLTDYNGWVLYVNGREKITNCPSVNDGRWHHIAITWTSTGGAWRVYINGELSDGGTGLSIGKAIPGGGALVLGQEQDKKGEGFNPAESFVGSISQLNLWDYVLSPQQVKSLATSCPEELSKGNVLAWPDFLSGIVGKVKIDSKSIFCSDCPRLGGSVPHLRTASEDLKPGSKVNLFCEPGFQLVGNPVQYCLNQGQWTQPLPHCERIRCGVPPPLENGFHSADDFYAGSTVTYQCNNGYYLLGDSRMFCTDNGSWNGVSPSCLDVDECAVGSDCSEHASCLNVDGSYICSCVPPYTGDGKNCAEPIKCKAPGNPENGHSSGEIYTVGAEVTFSCQEGYQLMGVTKITCLESGEWNHLIPYCKAVSCGKPAIPENGCIEELAFTFGSKVTYRCNKGYTLAGDKESSCLANSSWSHSPPVCEPVKCSSPENINNGKYILSGLTYLSTASYSCDTGYSLQGPSIIECTASGIWDRAPPACHLVFCGEPPAIKDAVITGNNFTFRNTVTYTCKEGYTLAGLDTIECLADGKWSRSDQQCLAVSCDEPPIVDHASPETAHRLFGDIAFYYCSDGYSLADNSQLLCNAQGKWVPPEGQDMPRCIAHFCEKPPSVSYSILESVSKAKFAAGSVVSFKCMEGFVLNTSAKIECMRGGQWNPSPMSIQCIPVRCGEPPSIMNGYASGSNYSFGAMVAYSCNKGFYIKGEKKSTCEATGQWSSPIPTCHPVSCGEPPKVENGFLEHTTGRIFESEVRYQCNPGYKSVGSPVFVCQANRHWHSESPLMCVPLDCGKPPPIQNGFMKGENFEVGSKVQFFCNEGYELVGDSSWTCQKSGKWNKKSNPKCMPAKCPEPPLLENQLVLKELTTEVGVVTFSCKEGHVLQGPSVLKCLPSQQWNDSFPVCKIVLCTPPPLISFGVPIPSSALHFGSTVKYSCVGGFFLRGNSTTLCQPDGTWSSPLPECVPVECPQPEEIPNGIIDVQGLAYLSTALYTCKPGFELVGNTTTLCGENGHWLGGKPTCKAIECLKPKEILNGKFSYTDLHYGQTVTYSCNRGFRLEGPSALTCLETGDWDVDAPSCNAIHCDSPQPIENGFVEGADYSYGAIIIYSCFPGFQVAGHAMQTCEESGWSSSIPTCMPIDCGLPPHIDFGDCTKLKDDQGYFEQEDDMMEVPYVTPHPPYHLGAVAKTWENTKESPATHSSNFLYGTMVSYTCNPGYELLGNPVLICQEDGTWNGSAPSCISIECDLPTAPENGFLRFTETSMGSAVQYSCKPGHILAGSDLRLCLENRKWSGASPRCEAISCKKPNPVMNGSIKGSNYTYLSTLYYECDPGYVLNGTERRTCQDDKNWDEDEPICIPVDCSSPPVSANGQVRGDEYTFQKEIEYTCNEGFLLEGARSRVCLANGSWSGATPDCVPVRCATPPQLANGVTEGLDYGFMKEVTFHCHEGYILHGAPKLTCQSDGNWDAEIPLCKPVNCGPPEDLAHGFPNGFSFIHGGHIQYQCFPGYKLHGNSSRRCLSNGSWSGSSPSCLPCRCSTPVIEYGTVNGTDFDCGKAARIQCFKGFKLLGLSEITCEADGQWSSGFPHCEHTSCGSLPMIPNAFISETSSWKENVITYSCRSGYVIQGSSDLICTEKGVWSQPYPVCEPLSCGSPPSVANAVATGEAHTYESEVKLRCLEGYTMDTDTDTFTCQKDGRWFPERISCSPKKCPLPENITHILVHGDDFSVNRQVSVSCAEGYTFEGVNISVCQLDGTWEPPFSDESCSPVSCGKPESPEHGFVVGSKYTFESTIIYQCEPGYELEGNRERVCQENRQWSGGVAICKETRCETPLEFLNGKADIENRTTGPNVVYSCNRGYSLEGPSEAHCTENGTWSHPVPLCKPNPCPVPFVIPENALLSEKEFYVDQNVSIKCREGFLLQGHGIITCNPDETWTQTSAKCEKISCGPPAHVENAIARGVHYQYGDMITYSCYSGYMLEGFLRSVCLENGTWTSPPICRAVCRFPCQNGGICQRPNACSCPEGWMGRLCEEPICILPCLNGGRCVAPYQCDCPPGWTGSRCHTAVCQSPCLNGGKCVRPNRCHCLSSWMGHNCSRKRRTGF

SEQ ID NO: 207 - DNA, 3260 bp, Homo sapiens
  CDS (171)..(2861)
  misc_feature (3171)..(3171): Wherein n may be a, c, g or t
ggcacgagcaggagcttcccaagaacccgaaaacttcccagtatttcttccagttgcaggagcatttcgtgaaagatctggtcggcccaggccccttcactgtttttgcacctttatctgcagcctttgatgaggaagctcgggttaaagactgggacaaatacggtttaatgccccaggttcttcggtaccatgtggtcgcctgccaccagctgcttctggaaaacctgaaattgatctcaaatgctacttccctccaaggagagccaatagtcatctccgtctctcagagcacggtgtatataaataataaggctaagatcatatccagtgatatcatcagtactaatgggattgttcatatcatagacaaattgctatctcccaaaaatttgcttatcactcccaaagacaactctggaagaattctgcaaaatcttacgactttggcaacaaacaatggctacatcaaatttagcaacttaatacaggactcaggtttgctgagtgtcatcaccgatcccatccacaccccagtcactctcttctggcccaccgaccaagccctccatgccctacctgctgaacaacaggacttcctgttcaaccaagacaacaaggacaagctgaaggagtatttgaagtttcatgtgatacgagatgccaaggttttagctgtggatcttcccacatccactgcctggaagaccctgcaaggttcagagctgagtgtgaaatgtggagctggcagggacatcggtgacctctttctgaatggccaaacctgcagaattgtgcagcgggagctcttgtttgacctgggtgtggcctacggcattgactgtctgctgattgatcccaccctggggggccgctgtgacacctttactactttcgatgcctcgggggagtgtgggagctgtgtcaatactcccagctgcccaaggtggagtaaaccaaagggtgtgaagcagaagtgtctctacaacctgcccttcaagaggaacctggaaggctgccgggagcggtgcagcctggtgatacagatccccaggtgctgcaagggctacttcgggcgagactgtcaggcctgccctggaggaccagatgccccgtgtaataaccggggtgtctgccttgatcagtactcggccaccggagagtgtaaatgcaacaccggcttcaatgggacggcgtgtgagatgtgctggccggggagattcgggcctgattgtctgccctgtggctgctcagaccacggacagtgcgatgatggcatcacgggctccgggcagtgcctctgtgaaacggggtggacaggcccctcgtgtgacactcaggcagttttgcctgcagtgtgtacgcctccttgttctgctcatgccacctgtaaggagaacaacacgtgtgagtgtaacctggattatgaaggtgacggaatcacatgcacagttgtggatttctgcaaacaggacaacgggggctgtgcaaaggtggccagatgctcccagaagggcacgaaggtctcctgcagctgccagaagggatacaaaggggacgggcacagctgcacagagatagacccctgtgcagacggccttaacggagggtgtcacgagcacgccacctgtaagatgacaggcccgggcaagcacaagtgtgagtgtaaaagtcactatgtcggagatgggctgaactgtgagccggagcagctgcccattgaccgctgcttacaggacaatgggcagtgccatgcagacgccaaatgtgtcgacctccacttccaggataccactgttggggtgttccatctacgctccccactgggccagtataagctgacctttgacaaagccagagaggcctgtgccaacgaagctgcgaccatggcaacctacaaccagctctcctatgcccagaaggccaagtaccacctgtgctcagcaggctggctggagaccgggcgggttgcctaccccacagccttcgcctcccagaactgtggctctggtgtggttgggatagtggactatggacctagacccaacaagagtgaaatgtgggatgtcttctgctatcggatgaaagatgtgaactgcacctgcaaggtgggctatgtgggagatggcttctcatgcagtgggaacctgctgcaggtcctgatgtccttcccctcactcacaaacttcctgacggaagtgctggcctattccaacagctcagctcgaggccgtgcatttctagaacacctgactgacctgtccatccgcggcaccctctttgtgccacagaacagtgggctgggggagaatgagaccttgtctgggcgggacatcgagcaccacctcgccaatgtcagcatgtttttctacaatgaccttgtcaatggcaccaccctgcaaacgagggtgggaagcaagctgctcatcactgccagccaggacccactccaaccgacggagaccaggtttgttgatggaagagccattctgcagtgggacatctttgcctccaatgggatcattcatgtcatttccaggcctttaaaagcaccccctgcccccgtgaccttgacccacactggcttgggagcagggatcttctttgccatcatcctggtgactggggctgttgccttggctgcttactcctactttcggataaaccggagaacaatcggcttccagcattttgagtcggaagaggacattaatgttgcagctcttggcaagcagcagcctgagaatatctcgaaccccttgtatgagagcacaacctcagctcccccagaaccttcctacgaccccttcacggactctgaagaacggcagcttgagggcaatgaccccttgaggacactgtgagggcctggacgggagatgccagccatcactcactgccacctgggccatcaactgtgaattctcagcaccagttgccttttaggaacgtaaagtcctttaagcactcagaagccatacctcatctctctggctgatctgggggttgtttctgtgggtgagagatgtgttgctgtgcccacccagtacagcttcctcctctgaccctttggctcttcttcctttgtactcttcagctggcacctgctccattctgccctacatgatgggtaactgtgatctttcttccctgttagattgtaagcctccntctttgtatcccagcccctagcccagtgcctgacacaggaactgtgcacaataaaggtttatggaacagaaaaaaaaaaaaaaaaaaaa

SEQ ID NO: 208 - protein, 897 aa, Homo sapiens
MPQVLRYHVVACHQLLLENLKLISNATSLQGEPIVISVSQSTVYINNKAKIISSDIISTNGIVHIIDKLLSPKNLLITPKDNSGRILQNLTTLATNNGYIKFSNLIQDSGLLSVITDPIHTPVTLFWPTDQALHALPAEQQDFLFNQDNKDKLKEYLKFHVIRDAKVLAVDLPTSTAWKTLQGSELSVKCGAGRDIGDLFLNGQTCRIVQRELLFDLGVAYGIDCLLIDPTLGGRCDTFTTFDASGECGSCVNTPSCPRWSKPKGVKQKCLYNLPFKRNLEGCRERCSLVIQIPRCCKGYFGRDCQACPGGPDAPCNNRGVCLDQYSATGECKCNTGFNGTACEMCWPGRFGPDCLPCGCSDHGQCDDGITGSGQCLCETGWTGPSCDTQAVLPAVCTPPCSAHATCKENNTCECNLDYEGDGITCTVVDFCKQDNGGCAKVARCSQKGTKVSCSCQKGYKGDGHSCTEIDPCADGLNGGCHEHATCKMTGPGKHKCECKSHYVGDGLNCEPEQLPIDRCLQDNGQCHADAKCVDLHFQDTTVGVFHLRSPLGQYKLTFDKAREACANEAATMATYNQLSYAQKAKYHLCSAGWLETGRVAYPTAFASQNCGSGVVGIVDYGPRPNKSEMWDVFCYRMKDVNCTCKVGYVGDGFSCSGNLLQVLMSFPSLTNFLTEVLAYSNSSARGRAFLEHLTDLSIRGTLFVPQNSGLGENETLSGRDIEHHLANVSMFFYNDLVNGTTLQTRVGSKLLITASQDPLQPTETRFVDGRAILQWDIFASNGIIHVISRPLKAPPAPVTLTHTGLGAGIFFAIILVTGAVALAAYSYFRINRRTIGFQHFESEEDINVAALGKQQPENISNPLYESTTSAPPEPSYDPFTDSEERQLEGNDPLRTL

SEQ ID NO: 209 - DNA, 1668 bp, Homo sapiens
  CDS (1)..(1668)
ggatccagaattctgcaaaatcttacgactttggcaacaaacaatggctacatcaaatttagcaacttaatacaggactcaggtttgctgagtgtcatcaccgatcccatccacaccccagtcactctcttctggcccaccgaccaagccctccatgccctacctgctgaacaacaggacttcctgttcaaccaagacaacaaggacaagctgaaggagtatttgaagtttcatgtgatacgagatgccaaggttttagctgtggatcttcccacatccactgcctggaagaccctgcaaggttcagagctgagtgtgaaatgtggagctggcagggacatcggtgacctctttctgaatggccaaacctgcagaattgtgcagcgggagctcttgtttgacctgggtgtggcctacggcattgactgtctgctgattgatcccaccctggggggccgctgtgacacctttactactttcgatgcctcgggggagtgtgggagctgtgtcaatactcccagctgcccaaggtggagtaaaccaaagggtgtgaagcagaagtgtctctacaacctgcccttcaagaggaacctggaaggctgccgggagcggtgcagcctggtgatacagatccccaggtgctgcaagggctacttcgggcgagactgtcaggcctgccctggaggaccagatgccccgtgtaataaccggggtgtctgccttgatcagtactcggccaccggagagtgtaaatgcaacaccggcttcaatgggacggcatgtgagatgtgctggccggggagatttgggcctgattgtctgccctgtggctgctcagaccacggacagtgcgatgatggcatcacgggctccgggcagtgcctctgtgaaacggggtggacaggcccctcgtgtgacactcaggcagttttgcctgcagtgtgtacgcctccttgttctgctcatgccacctgtaaggagaacaacacgtgtgagtgtaacctggattatgaaggtgacggaatcacatgcacagttgtggatttctgcaaacaggacaacgggggctgtgcaaaggtggccagatgctcccagaagggcacgaaggtctcctgcagctgccagaagggatacaaaggggacgggcacagctgcacagagatagacccctgtgcagacggccttaacggagggtgtcacgagcacgccacctgtaagatgacaggcccgggcaagcacaagtgtgagtgtaaaagtcactatgtcggagatgggctgaactgtgggccggagcagctgcccattgaccgctgcttacaggacaatgggcagtgccatgcagacgccaaatgtgtcgacctccacttccaggataccactgttggggtgttccatctacgctccccactgggccagtataagctgacctttgacaaagccagagaggcctgtgccaacgaagctgcgaccatggcaacctacaaccagctctcctatgcccagaaggccaagtaccacctgtgctcagcaggctggctggagaccgggcgggttgcctaccccacagccttcgcctcccagaactgtggctctggtgtggttgggatagtggactatggacctagacccaacaagagtgaaatgtgggatgtcttctgctatcggccg

SEQ ID NO: 210 - protein, 556 aa, Homo sapiens
GSRILQNLTTLATNNGYIKFSNLIQDSGLLSVITDPIHTPVTLFWPTDQALHALPAEQQDFLFNQDNKDKLKEYLKFHVIRDAKVLAVDLPTSTAWKTLQGSELSVKCGAGRDIGDLFLNGQTCRIVQRELLFDLGVAYGIDCLLIDPTLGGRCDTFTTFDASGECGSCVNTPSCPRWSKPKGVKQKCLYNLPFKRNLEGCRERCSLVIQIPRCCKGYFGRDCQACPGGPDAPCNNRGVCLDQYSATGECKCNTGFNGTACEMCWPGRFGPDCLPCGCSDHGQCDDGITGSGQCLCETGWTGPSCDTQAVLPAVCTPPCSAHATCKENNTCECNLDYEGDGITCTVVDFCKQDNGGCAKVARCSQKGTKVSCSCQKGYKGDGHSCTEIDPCADGLNGGCHEHATCKMTGPGKHKCECKSHYVGDGLNCGPEQLPIDRCLQDNGQCHADAKCVDLHFQDTTVGVFHLRSPLGQYKLTFDKAREACANEAATMATYNQLSYAQKAKYHLCSAGWLETGRVAYPTAFASQNCGSGVVGIVDYGPRPNKSEMWDVFCYRP

SEQ ID NO: 211 - DNA, 2011 bp, Homo sapiens
  CDS (877)..(1821)
gggtgtgatgggcttctagtttctctagctgcatcacccttgaaccatccagagtcccagtaagccacgggcttgagcatggaggagaatcctcagagacagaacccctgcccacatgtctgggccttgctcaagccagcaaggggctgaatccctgtgtttcaggactcaggtttgctgagtgtcatcaccgatcccatccacaccccagtcactctcttctggcccaccgaccaagccctccatgccctacctgctgaacaacaggacttcctgttcaaccaagacaacaaggacaagctgaaggagtatttgaagtttcatgtgatacgagatgccaaggttttagctgtggatcttcccacatccactgcctggaagaccctgcaaggttcagagctgagtgtgaaatgtggagctggcagggacatcggtgacctctttctgaatggccaaacctgcagaattgtgcagcgggagctcttgtttgacctgggtgtggcctacggcattgactgtctgctgattgatcccaccctggggggccgctgtgacacctttactactttcgatgcctcgggggagtgtgggagctgtgtcaatactcccagctgcccaaggtggagtaaaccaaagggtgtgaagcagaagtgtctctacaacctgcccttcaagaggaacctggaaggctgccgggagcgatgcagcctggtgatacagatccccaggtgctgcaagggctacttcgggcgagactgtcaggcctgccctggaggaccagatgccccgtgtaataaccggggtgtctgccttgatcagtactcggccaccggagagtgtaaatgcaacaccggcttcaatgggacggcgtgtgagatgtgctggccggggagatttgggcctgattgtctgccctgtggctgctcagaccacggacagtgcgatgatggcatcacgggctccgggcagtgcctctgtgaaacggggtggacaggcccctcgtgtgacactcaggcagttttgtctgcagtgtgtacgcctccttgttctgctcatgccacctgtaaggagaacaacacgtgtgagtgtaacctggattatgaaggtgacggaatcacatgcacagttgtggatttctgcaaacaggacaacgggggctgtgcaaaggtggccagatgctcccagaagggcacgaaggtctcctgcagctgccagaagggatacaaaggggacgggcacagctgcacagagatagacccctgtgcagacggccttaacggagggtgtcacgagcacgccacctgtaagatgacaggcccgggcaagcacaagtgtgagtgtaaaagtcactatgtcggagatgggctgaactgtgagccggagcagctgcccattgaccgctgcttacaggacaatgggcagtgccatgcagacgccaaatgtgccgacctccacttccaggataccactgttggggtgttccatctacgctccccactgggccagtataagctgacctttgacaaagccagagaggcctgtgccaacgaagctgcgaccatggcaacctacaaccagctctcctatgcccagaaggccaagtaccacctgtgctcagcaggctggctggagaccgggcgggttgcctaccccacagccttcgcctcccagaactgtggctctggtgtggttgggatagtggactatggacccagacccaacaagagtgaaatgtgggatgtcttctgctatcggatgaaaggaagtgctggcctattccaacagctcagctcgaggccgtgcatttctagaacacctgactgacctgtccatccgcggcaccctctttgtgccacagaacagtgggctgggggagaatgagaccttgtctgggcgggacatcgaacaccacctcgccaatgtcagcatgtttttctacaatgaccttgtcaatggcaccaccctgcaaacgaggctgggaagcaagctgctcatcactgccagccaggac

SEQ ID NO: 212 - protein, 315 aa, Homo sapiens
MCWPGRFGPDCLPCGCSDHGQCDDGITGSGQCLCETGWTGPSCDTQAVLSAVCTPPCSAHATCKENNTCECNLDYEGDGITCTVVDFCKQDNGGCAKVARCSQKGTKVSCSCQKGYKGDGHSCTEIDPCADGLNGGCHEHATCKMTGPGKHKCECKSHYVGDGLNCEPEQLPIDRCLQDNGQCHADAKCADLHFQDTTVGVFHLRSPLGQYKLTFDKAREACANEAATMATYNQLSYAQKAKYHLCSAGWLETGRVAYPTAFASQNCGSGVVGIVDYGPRPNKSEMWDVFCYRMKGSAGLFQQLSSRPCISRTPD

SEQ ID NO: 213 - DNA, 1804 bp, Homo sapiens
  CDS (877)..(1608)
gggtgtgatgggcttctagtttctctagctgcatcacccttgaaccatccagagtcccagtaagccacgggcttgagcatggaggagaatcctcagagacagaacccctgcccacatgtctgggccttgctcaagccagcaaggggctgaatccctgtgtttcaggactcaggtttgctgagtgtcatcaccgatcccatccacaccccagtcactctcttctggcccaccgaccaagccctccatgccctacctgctgaacaacaggacttcctgttcaaccaagacaacaaggacaagctgaaggagtatttgaagtttcatgtgatacgagatgccaaggttttagctgtggatcttcccacatccactgcctggaagaccctgcaaggttcagagctgagtgtgaaatgtggagctggcagggacatcggtgacctctttctgaatggccaaacctgcagaattgtgcagcgggagctcttgtttgacctgggtgtggcctacggcattgactgtctgctgattgatcccaccctggggggccgctgtgacacctttactactttcgatgcctcgggggagtgtgggagctgtgtcaatactcccagctgcccaaggtggagtaaaccaaagggtgtgaagcagaagtgtctctacaacctgcccttcaagaggaacctggaaggctgccgggagcgatgcagcctggtgatacagatccccaggtgctgcaagggctacttcgggcgagactgtcaggcctgccctggaggaccagatgccccgtgtaataaccggggtgtctgccttgatcagtactcggccaccggagagtgtaaatgcaacaccggcttcaatgggacggcgtgtgagatgtgctggccggggagatttgggcctgattgtctgccctgtggctgctcagaccacggacagtgcgatgatggcatcacgggctccgggcagtgcctctgtgaaacggggtggacaggcccctcgtgtgacactcaggcagttttgtctgcagtgtgtacgcctccttgttctgctcatgccacctgtaaggagaacaacacgtgtgagtgtaacctggattatgaaggtgacggaatcacatgcacagttgtggatttctgcaaacaggacaacgggggctgtgcaaaggtggccagatgctcccagaagggcacgaaggtctcctgcagctgccagaagggatacaaaggggacgggcacagctgcacagagatagacccctgtgcagacggccttaacggagggtgtcacgagcacgccacctgtaagatgacaggcccgggcaagcacaagtgtgagtgtaaaagtcactatgtcggagatgggctgaactgtgagccggagcagctgcccattgaccgctgcttacaggacaatgggcagtgccatgcagacgccaaatgtgtcgacctccacttccaggataccactgttggggtgttccatctacgctccccactgggccagtataagctgacctttgacaaagccagagaggcctgtgccaacgaagctgcgaccatggcaacctacaaccagctctcctatgcccagaagagagaagagaaatgagtatgaaagacctgggcacctacaagaaagagaggacacttttgttcacccagtggctcaatcaaccagtcaacatctaatgaccacctactgtgtgccaggcacagaggtgcaataggcaaagccaagtaccacctgtgctcagcaggctggctggagaccgggcgggttgcctaccccacagccttcgcct

SEQ ID NO: 214 - protein, 244 aa, Homo sapiens
MCWPGRFGPDCLPCGCSDHGQCDDGITGSGQCLCETGWTGPSCDTQAVLSAVCTPPCSAHATCKENNTCECNLDYEGDGITCTVVDFCKQDNGGCAKVARCSQKGTKVSCSCQKGYKGDGHSCTEIDPCADGLNGGCHEHATCKMTGPGKHKCECKSHYVGDGLNCEPEQLPIDRCLQDNGQCHADAKCVDLHFQDTTVGVFHLRSPLGQYKLTFDKAREACANEAATMATYNQLSYAQKREEK

SEQ ID NO: 215 - DNA, 2512 bp, Homo sapiens
  CDS (416)..(2422)
atagggctcgagcggctgcccgggcaggtctcatgcctcagcctccggagtagtatttttagtagagatggtgtttaccatgtgggccaggctggtctcgaactcctggcctcaagtgatccacccgcctcggcctcccagagtgctgggattacaggcatgagccactgcacccagccttgtttgtattttgaattccaaatggaaataccttcatgatcttcccactactaaaggtttaaatctggcactgatacctctccaagagggctatatactatgcagtgtttcccagcatgtttcacaagaaaattcttttttgaggatcatctcacagaacttgggatctttgcaacatgtattgtgaaatccaggccagaggaaccccatgttccttccacactgatattccacaatggaggcaagaaaggagctagagtcacttcctcccttttgtctgaacagcctccactctataatcctgaccacaaagcttacttcccagagtctgggtgggccgagaggtgtggaagagagaatggaggacaggagagccaaatggcacattgcagcaaaagactcctgcctctggctgaaaccctctgatcttctgttacaggttaaagactgggacaaatacggtttaatgccccaggttcttcggtaccatgtggtcgcctgccaccagctgcttctggaaaacctgaaattgatctcaaatgctacttccctccaaggagagccaatagtcatctccgtctctcagagcacggtgtatataaacaataaggctaagatcatatccagtgatatcatcagtactaatgggattgttcatatcatagacaaattgctatctcccaaaaatttgcttatcactcccaaagacaactctggaagaattctgcaaaatcttacgactttggcaacaaacaatggctacatcaaatttagcaacttaatacaggactcaggtttgctgagtgtcatcaccgatcccatccacaccccagtcactctcttctggcccaccgaccaagccctccatgccctacctgctgaacaacaggacttcctgttcaaccaagacaacaaggacaagctgaaggagtatttgaagtttcatgtgatacgagatgccaaggttttagctgtggatcttcccacatccactgcctggaagaccctgcaaggttcagagctgagtgtgaaatgtggagctggcagggacatcggtgacctctttctgaatggccaaacctgcagaattgtgcagcgcgagctcttgtttgacctgggtgtggcctacggcattgactgtctgctgattgatcccaccctggggggccgctgtgacacctttactactttcgatgcctcgggggagtgtgggagctgtgtcaatactcccagctgcccaaggtggagtaaaccaaagggtgtgaagcagaagtgtctctacaacctgcccttcaagaggaacctggaaggctgccgggagcggtgcagcctggtgatacagatccccaggtgctgcaagggctacttcgggcgagactgtcaggcctgccctggaggaccagttgccccgtgtaataaccggggtgtctgccttgatcagtactcggccaccggagagtgtaaatgcaacaccggcttcaatgggacggcgtgtgagatgtgctggccggggagatttgggcctgattgtctgccctgtggctgctcagaccacggacagtgcgatgatggcatcacgggctccgggcagtgcctctgtgaaacggggtggacaggcccctcgtgtgacactcaggcagttttgtctgcagtgtgtacgcctccttgttctgctcatgccacctgtaaggagaacaacacgtgtgagtgtaacctggattatgaaggtgacggaatcacatgcacagttgtggatttctgcaaacaggacaacgggggctgtgcaaaggtggccagatgctcccagaagggcacgaaggtctcctgcagctgccagaagggatacaaaggggacgggcacagctgcacagagatagacccctgtgcagacggccttaacggagggtgtcacgagcacgccacctgtaagatgacaggcccgggcaagcacaagtgtgagtgtaaaagtcactatgtcggagatgggctgaactgtgagccggagcagctgcccattgaccgctgcttacaggacaatgggcagtgccatgcagacgccaaatgtgtcgacctccacttccaggataccactgttggggtgttccatctacgctccccactgggccagtataagctgacctttgacaaagccagagaggcctgtgccaacgaagctgcgaccatggcaacctacaaccagctctcctatgcccagaagacctggtattcctttaccaaggaataaagcctttgatgccaggacccagactcaaggagaatctgaatctctgctctcctgcttgctggtcatgtggccttgatatcaagccac

SEQ ID NO: 216 - protein, 669 aa, Homo sapiens
MEARKELESLPPFCLNSLHSIILTTKLTSQSLGGPRGVEERMEDRRAKWHIAAKDSCLWLKPSDLLLQVKDWDKYGLMPQVLRYHVVACHQLLLENLKLISNATSLQGEPIVISVSQSTVYINNKAKIISSDIISTNGIVHIIDKLLSPKNLLITPKDNSGRILQNLTTLATNNGYIKFSNLIQDSGLLSVITDPIHTPVTLFWPTDQALHALPAEQQDFLFNQDNKDKLKEYLKFHVIRDAKVLAVDLPTSTAWKTLQGSELSVKCGAGRDIGDLFLNGQTCRIVQRELLFDLGVAYGIDCLLIDPTLGGRCDTFTTFDASGECGSCVNTPSCPRWSKPKGVKQKCLYNLPFKRNLEGCRERCSLVIQIPRCCKGYFGRDCQACPGGPVAPCNNRGVCLDQYSATGECKCNTGFNGTACEMCWPGRFGPDCLPCGCSDHGQCDDGITGSGQCLCETGWTGPSCDTQAVLSAVCTPPCSAHATCKENNTCECNLDYEGDGITCTVVDFCKQDNGGCAKVARCSQKGTKVSCSCQKGYKGDGHSCTEIDPCADGLNGGCHEHATCKMTGPGKHKCECKSHYVGDGLNCEPEQLPIDRCLQDNGQCHADAKCVDLHFQDTTVGVFHLRSPLGQYKLTFDKAREACANEAATMATYNQLSYAQKTWYSFTKE

SEQ ID NO: 217 - DNA, 2483 bp, Homo sapiens
  CDS (387)..(2393)
ctcatgcctcagcctccggagtagtatttttagtagagatggtgtttaccatgtgggccaggctggtctcgaactcctggcctcaagtgatccacccgcctcggcctcccagagtgctgggattacaggcatgagccactgcacccagccttgtttgtattttgaattccaaatgggaattccttcatgatcttcccactactaaaggtttaaatctggcactgatacctctccaagagggctatatactatgcagtgtttcccagcatgtttcacaagaaaattcttttttgaggatcatctcacagaacttgggatctttgcaacatgtattgtgaaatccaggccagaggaaccccatgttccttccacactgatattccacaatggaggcaagaaaggagctagagtcacttcctcccttttgtctgaacagcctccactctataatcctgaccacaaagcttacttcccagagtctgggtgggccgagaggtgtggaagagagaatggaggacaggagagccaaatggcacattgcagcaaaagactcctgcctctggctgaaaccctctgatcttctgttacaggttaaagactgggacaaatacggtttaatgccccaggttcttcggtaccatgtggtcgcctgccaccagctgcttctggaaaacctgaaattgatctcaaatgctacttccctccaaggagagccaatagtcatctccgtctctcagagcacggtgtatataaacaataaggctaagatcatatccagtgatatcatcagtactaatgggattgttcatatcatagacaaattgctatctcccaaaaatttgcttatcactcccaaagacaactctggaagaattctgcaaaatcttacgactttggcaacaaacaatggctacatcaaatttagcaacttaatacaggactcaggtttgctgagtgtcatcaccgatcccatccacaccccagtcactctcttctggcccaccgaccaagccctccatgccctacctgctgaacaacaggacttcctgttcaaccaagacaacaaggacaagctgaaggagtatttgaagtttcatgtgatacgagatgccaaggttttagctgtggatcttcccacatccactgcctggaagaccctgcaaggttcagagctgagtgtgaaatgtggagctggcagggacatcggtgacctctttctgaatggccaaacctgcagaattgtgcagcgggagctcttgtttgacctgggtgtggcctacggcattgactgtctgctgattgatcccaccctggggggccgctgtgacacctttactactttcgatgcctcgggggagtgtgggagctgtgtcaatactcccagctgcccaaggtggagtaaaccaaagggtgtgaagcagaagtgtctctacaacctgcccttcaagaggaacctggaaggctgccgggagcgatgcagcctggtgatacagatccccaggtgctgcaagggctacttcgggcgagactgtcaggcctgccctggaggaccagatgccccgtgtaataaccggggtgtctgccttgatcagtactcggccaccggagagtgtaaatgcaacaccggcttcaatgggacggcgtgtgagatgtgctggccggggagatttgggcctgattgtctgccctgtggctgctcagaccacggacagtgcgatgatggcatcacgggctccgggcagtgcctctgtgaaacggggtggacaggcccctcgtgtgacactcaggcagttttgtctgcagtgtgtacgcctccttgttctgctcatgccacctgtaaggagaacaacacgtgtgagtgtaacctggattatgaaggtgacggaatcacatgcacagttgtggatttctgcaaacaggacaacgggggctgtgcaaaggtggccagatgctcccagaagggcacgaaggtctcctgcagctgccagaagggatacaaaggggacgggcacagctgcacagagatagacccctgtgcagacggccttaacggagggtgtcacgagcacgccacctgtaagatgacaggcccgggcaagcacaagtgtgagtgtaaaagtcactatgtcggagatgggctgaactgtgagccggagcagctgcccattgaccgctgcttacaggacaatgggcagtgccatgcagacgccaaatgtgtcgacctccacttccaggataccactgttggggtgttccatctacgctccccactgggccagtataagctgacctttgacaaagccagagaggcctgtgccaacgaagctgcgaccatggcaacctacaaccagctctcctatgcccagaagacctggtattcctttaccaaggaataaagcctttgatgccaggacccagactcaaggagaatctgaatctctgctctcctgcttgctggtcatgtggccttgatatcaagccac

SEQ ID NO: 218 - protein, 669 aa, Homo sapiens [sequence omitted]

SEQ ID NO: 219 - DNA, 1353 bp, Homo sapiens
  CDS (1)..(1263)
cttcccacatccactgcctggaagaccctgcaaggttcagagctgagtgtgaaatgtggagctggcagggacatcggtgacctctttctgaatggccaaacctgcagaattgtgcagcgggagctcttgtttgacctgggtgtggcctacggcattgactgtctgctgattgatcccaccctggggggccgctgtgacacctttactactttcgatgcctcgggggagtgtgggagctgtgtcaatactcccagctgcccaaggtggagtaaaccaaagggtgtgaagcagaagtgtctctacaacctgcccttcaagaggaacctggaaggctgccgggagcgatgcagcctggtgatacagatccccaggtgctgcaagggctacttcgggcgagactgtcaggcctgccctggaggaccagatgccccgtgtaataaccggggtgtctgccttgatcagtactcggccaccggagagtgtaaatgcaacaccggcttcaatgggacggcgtgtgagatgtgctggccggggagatttgggcctgattgtctgccctgtggctgctcagaccacggacagtgcgatgatggcatcacgggctccgggcagtgcctctgtgaaacggggtggacaggcccctcgtgtgacactcaggcagttttgtctgcagtgtgtacgcctccttgttctgctcatgccacctgtaaggagaacaacacgtgtgagtgtaacctggattatgaaggtgacggaatcacatgcacagttgtggatttctgcaaacaggacaacgggggctgtgcaaaggtggccagatgctcccagaagggcacgaaggtctcctgcagctgccagaagggatacaaaggggacgggcacagctgcacagagatagacccctgtgcagacggccttaacggagggtgtcacgagcacgccacctgtaagatgacaggcccgggcaagcacaagtgtgagtgtaaaagtcactatgtcggagatgggctgaactgtgagccggagcagctgcccattgaccgctgcttacaggacaatgggcagtgccatgcagacgccaaatgtgtcgacctccacttccaggataccactgttggggtgttccatctacgctccccactgggccagtataagctgacctttgacaaagccagagaggcctgtgccaacgaagctgcgaccatggcaacctacaaccagctctcctatgcccagaagacctggtattcctttaccaaggaataaagcctttgatgccaggacccagactcaaggagaatctgaatctctgctctcctgcttgctggtcatgtggccttgatatcaagccac

SEQ ID NO: 220 - protein, 421 aa, Homo sapiens
LPTSTAWKTLQGSELSVKCGAGRDIGDLFLNGQTCRIVQRELLFDLGVAYGIDCLLIDPTLGGRCDTFTTFDASGECGSCVNTPSCPRWSKPKGVKQKCLYNLPFKRNLEGCRERCSLVIQIPRCCKGYFGRDCQACPGGPDAPCNNRGVCLDQYSATGECKCNTGFNGTACEMCWPGRFGPDCLPCGCSDHGQCDDGITGSGQCLCETGWTGPSCDTQAVLSAVCTPPCSAHATCKENNTCECNLDYEGDGITCTVVDFCKQDNGGCAKVARCSQKGTKVSCSCQKGYKGDGHSCTEIDPCADGLNGGCHEHATCKMTGPGKHKCECKSHYVGDGLNCEPEQLPIDRCLQDNGQCHADAKCVDLHFQDTTVGVFHLRSPLGQYKLTFDKAREACANEAATMATYNQLSYAQKTWYSFTKE

SEQ ID NO: 221 - DNA, 3625 bp, Homo sapiens
  CDS (387)..(2021)
ctcatgcctcagcctccggagtagtatttttagtagagatggtgtttaccatgtgggccaggctggtctcgaactcctggcctcaagtgatccacccgcctcggcctcccagagtgctgggattacaggcatgagccactgcacccagccttgtttgtattttgaattccaaatggaaataccttcatgatcttcccactactaaaggtttaaatctggcactgatacctctccaagagggctatatactatgcagtgtttcccagcatgtttcacaagaaaattcttttttgaggatcatctcacagaacttgggatctttgcaacatgtattgtgaaatccaggccagaggaaccccatgttccttccacactgatattccacaatggaggcaagaaaggagctagagtcacttcctcccttttgtctgaacagcctccactctataatcctgaccacaaagcttacttcccagagtctgggtgggccgagaggtgtggaagagagaatggaggacaggagagccaaatggcacattgcagcaaaagactcctgcctctggctgaaaccctctgatcttctgttacaggttaaagactgggacaaatacggtttaatgccccaggttcttcggtaccatgtggtcgcctgccaccagctgcttctggaaaacctgaaattgatctcaaatgctacttccctccaaggagagccaatagtcatctccgtctctcagagcacggtgtatataaataataaggctaagatcatatccagtgatatcatcagtactaatgggattgttcatatcatagacaaattgctatctcccaaaaatttgcttatcactcccaaagacaactctggaagaattctgcaaaatcttacgactttggcaacaaacaatggctacatcaaatttagcaacttaatacaggactcaggtttgctgagtgtcatcaccgatcccatccacaccccagtcactctcttctggcccaccgaccaagccctccatgccctacctgctgaacaacaggacttcctgttcaaccaagacaacaaggacaagctgaaggagtatttgaagtttcatgtgatacgagatgccaaggttttagctgtggatcttcccacatccactgcctggaagaccctgcaaggttcagagctgagtgtgaaatgtggagctggcagggacatcggtgacctctttctgaatggccaaacctgcagaattgtgcagcgggagctcttgtttgacctgggtgtggcctacggcattgactgtctgctgattgatcccaccctggggggccgctgtgacacctttactactttcgatgcctcgggggagtgtgggagctgtgtcaatactcccagctgcccaaggtggagtaaaccaaagggtgtgaagcagaagtgtctctacaacctgcccttcaagaggaacctggaaggctgccgggagcggtgcagcctggtgatacagatccccaggtgctgcaagggctacttcgggcgagactgtcagggtgagggtgcctcttcccccctcgcaactctaaaagtgtctgccttgatcagtactcggccaccggagagtgtaaatgcaacaccggcttcaatgggacggcgtgtgagatgtgctggccggggagatttgggcctgattgtctgccctgtggctgctcagaccacggacagtgcgatgatggcatcacgggctccgggcagtgcctctgtgaaacggggtggacaggcccctcgtgtgacactcaggcagttttgcctgcagtgtgtacgcctccttgttctgctcatgccacctgtaaggagaacaacacgtgtgagtgtaacctggattatgaaggtgacggaatcacatgcacagttgtggatttctgcaaacaggacaacgggggctgtgcaaaggtggccagatgctcccagaagggcacgaaggtctcctgcagctgccagaagggatacaaaggggacgggcacagctgcacagagatagacccctgtgcagacggccttaacggagggtgtcacgagcacgccacctgtaagatgacaggcccgggcaagcacaagtgtgagtgtaaaagtcactatgtcggagatgggctgaactgtgagccggagcagctgcccattgaccgctgcttacaggacaatgggcagtgccatgcagacgccaaatgtgtcgacctccacttccaggataccactgttggggtgttccatctacgctccccactgggccagtataagctgacctttgacaaagccagagaggcctgtgccaacgaagctgcgaccatggcaacctacaaccagctctcctatgcccagaaggccaagtaccacctgtgctcagcaggctggctggagaccgggcgggttgcctaccccacagccttcgcctcccagaactgtggctctggtgtggttgggatagtggactatggacctagacccaacaagagtgaaatgtgggatgtcttctgctatcggatgaaaggaagtgctggcctattccaacagctcagctcgaggccgtgcatttctagaacacctgactgacctgtccatccgcggcaccctctttgtgccacagaacagtgggctgggggagaatgagaccttgtctgggcgggacatcgagcaccacctcgccaatgtcagcatgtttttctacaatgaccttgtcaatggcaccaccctgcaaacgaggctgggaagcaagctgctcatcactgccagccaggacccactccaaccgacggagaccaggtttgttgatggaagagccattctgcagtgggacatctttgcctccaatgggatcattcatgtcatttccaggcctttaaaagcaccccctgcccccgtgaccttgacccacactggcttgggagcagggatcttctttgccatcatcctggtgactggggctgttgccttggctgcttactcctactttcggataaaccggagaacaatcggcttccagcattttgagtcggaagaggacattaatgttgcagctcttggcaagcagcagcctgagaatatctcgaaccccttgtatgagagcacaacctcagctcccccagaaccttcctacgaccccttcacggactctgaagaacggcagcttgagggcaatgaccccttgaggacactgtgagggcctggacgggagatgccagccatcactcactgccacctgggccatcaactgtgaattctcagcaccagttgccttttaggaacgtaaagtcctttaagcactcagaagccatacctcatctctctggctgatctgggggttgtttctgtgggtgagagatgtgttgctgtgcccacccagtacagcttcctcctctgaccctttggctcttcttcctttgtactcttcagctggcacctgctccattctgccctacatgatgggtaactgtgatctttcttccctgttagattgtaagcctccgtctttgtatcccagcccctagcccagtgcctgacacaggaactgtgcacaataaaggtttatggaacagaaacaaagtcaaaaaaaaaaaaaaaaaaaaaaaaaaaaaaaaaaaaaac

SEQ ID NO: 222 - protein, 545 aa, Homo sapiens
MEARKELESLPPFCLNSLHSIILTTKLTSQSLGGPRGVEERMEDRRAKWHIAAKDSCLWLKPSDLLLQVKDWDKYGLMPQVLRYHVVACHQLLLENLKLISNATSLQGEPIVISVSQSTVYINNKAKIISSDIISTNGIVHIIDKLLSPKNLLITPKDNSGRILQNLTTLATNNGYIKFSNLIQDSGLLSVITDPIHTPVTLFWPTDQALHALPAEQQDFLFNQDNKDKLKEYLKFHVIRDAKVLAVDLPTSTAWKTLQGSELSVKCGAGRDIGDLFLNGQTCRIVQRELLFDLGVAYGIDCLLIDPTLGGRCDTFTTFDASGECGSCVNTPSCPRWSKPKGVKQKCLYNLPFKRNLEGCRERCSLVIQIPRCCKGYFGRDCQGEGASSPLATLKVSALISTRPPESVNATPASMGRRVRCAGRGDLGLIVCPVAAQTTDSAMMASRAPGSASVKRGGQAPRVTLRQFCLQCVRLLVLLMPPVRRTTRVSVTWIMKVTESHAQLWISANRTTGAVQRWPDAPRRARRSPAAARRDTKGTGTAAQR

SEQ ID NO: 223 - DNA, 1624 bp, Homo sapiens
  CDS (387)..(1529)
ctcatgcctcagcctccggagtagtatttttagtagagatggtgtttaccatgtgggccaggctggtctcgaactcctggcctcaagtgatccacccgcctcggcctcccagagtgctgggattacaggcatgagccactgcacccagccttgtttgtattttgaattccaaatggaaataccttcatgatcttcccactactaaaggtttaaatctggcactgatacctctccaagagggctatatactatgcagtgtttcccagcatgtttcacaagaaaattcttttttgaggatcatctcacagaacttgggatctttgcaacatgtattgtgaaatccaggccagaggaaccccatgttccttccacactgatattccacaatggaggcaagaaaggagctagagtcacttcctcccttttgtctgaacagcctccactctataatcctgaccacaaagcttacttcccagagtctgggtgggccgagaggtgtggaagagagaatggaggacaggagagccaaatggcacattgcagcaaaagactcctgcctctggctgaaaccctctgatcttctgttacaggttaaagactgggacaaatacggtttaatgccccaggttcttcggtaccatgtggtcgcctgccaccagctgcttctggaaaacctgaaattgatctcaaatgctacttccctccaaggagagccaatagtcatctccgtctctcagagcacggtgtatataaacaataaggctaagatcatatccagtgatatcatcagtactaatgggattgttcatatcatagacaaattgctatctcccaaaaatttgcttatcactcccaaagacaactctggaagaattctgcaaaatcttacgactttggcaacaaacaatggctacatcaaatttagcaacttaatacaggactcaggtttgctgagtgtcatcaccgatcccatccacaccccagtcactctcttctggcccaccgaccaagccctccatgccctacctgctgaacaacaggacttcctgttcaaccaagacaacaaggacaagctgaaggagtatttgaagtttcatgtgatacgagatgccaaggttttagctgtggatcttcccacatccactgcctggaagaccctgcaaggttcagagctgagtgtgaaatgtggagctggcagggacatcggtgacctctttctgaatggccaaacctgcagaattgtgcagcgggagctcttgtttgacctgggtgtggcctacggcattgactgtctgctgattgatcccaccctggggggccgctgtgacacctttactactttcgatgcctcgggggagtgtgggagctgtgtcaatactcccagctgcccaaggtggagtaaaccaaagggtgtgaagcagaagtgtctctacaacctgcccttcaagaggaacctggaaggctgccgggagcggtgcagcctggtgatacagatccccagcctgccctggaggaccagatgccccgtgtaataaccggggtgtctgccttgatcagtactcggccaccggagagtgtaaatgcaacaccggcttcaatgggacggcgtgtgagatgtgctggc

SEQ ID NO: 224 - protein, 381 aa, Homo sapiens
MEARKELESLPPFCLNSLHSIILTTKLTSQSLGGPRGVEERMEDRRAKWHIAAKDSCLWLKPSDLLLQVKDWDKYGLMPQVLRYHVVACHQLLLENLKLISNATSLQGEPIVISVSQSTVYINNKAKIISSDIISTNGIVHIIDKLLSPKNLLITPKDNSGRILQNLTTLATNNGYIKFSNLIQDSGLLSVITDPIHTPVTLFWPTDQALHALPAEQQDFLFNQDNKDKLKEYLKFHVIRDAKVLAVDLPTSTAWKTLQGSELSVKCGAGRDIGDLFLNGQTCRIVQRELLFDLGVAYGIDCLLIDPTLGGRCDTFTTFDASGECGSCVNTPSCPRWSKPKGVKQKCLYNLPFKRNLEGCRERCSLVIQIPSLPWRTRCPV

SEQ ID NO: 225 - DNA, 1857 bp, Homo sapiens
  CDS (1)..(1767)
gttcttcggtaccatgtggtcgcctgccaccagctgcttctggaaaacctgaaattgatctcaaatgctacttccctccaaggagagccaatagtcatctccgtctctcagagcacggtgtatataaacaataaggctaagatcatatccagtgatatcatcagtactaatgggattgttcatatcatagacaaattgctatctcccaaaaatttgcttatcactcccaaagacaactctggaagaattctgcaaaatcttacgactttggcaacaaacaatggctacatcaaatttagcaacttaatacaggactcaggtttgctgagtgtcatcaccgatcccatccacaccccagtcactctcttctggcccaccgaccaagccctccatgccctacctgctgaacaacaggacttcctgttcaaccaagacaacaaggacaagctgaaggagtatttgaagtttcatgtgatacgagatgccaaggttttagctgtggatcttcccacatccactgcctggaagaccctgcaaggttcagagctgagtgtgaaatgtggagctggcagggacatcggtgacctctttctgaatggccaaacctgcagaattgtgcagcgggagctcttgtttgacctgggtgtggcctacggcattgactgtctgctgattgatcccaccctggggggccgctgtgacacctttactactttcgatgcctcgggggagtgtgggagctgtgtcaatactcccagctgcccaaggtggagtaaaccaaagggtgtgaagcagaagtgtctctacaacctgcccttcaagaggaacctggaaggctgccgggagcgatgcagcctggtgatacagatccccaggtgctgcaagggctacttcgggcgagactgtcaggcctgccctggaggaccagatgccccgtgtaataaccggggtgtctgccttgatcagtactcggccaccggagagtgtaaatgcaacaccggcttcaatgggacggcgtgtgagatgtgctggccggggagatttgggcctgattgtctgccctgtggctgctcagaccacggacagtgcgatgatggcatcacgggctccgggcagtgcctctgtgaaacggggtggacaggcccctcgtgtgacactcaggcagttttgtctgcagtgtgtacgcctccttgttctgctcatgccacctgtaaggagaacaacacgtgtgagtgtaacctggattatgaaggtgacggaatcacatgcacagttgtggatttctgcaaacaggacaacgggggctgtgcaaaggtggccagatgctcccagaagggcacgaaggtctcctgcagctgccagaagggatacaaaggggacgggcacagctgcacagagatagacccctgtgcagacggccttaacggagggtgtcacgagcacgccacctgtaagatgacaggcccgggcaagcacaagtgtgagtgtaaaagtcactatgtcggagatgggctgaactgtgagccggagcagctgcccattgaccgctgcttacaggacaatgggcagtgccatgcagacgccaaatgtgtcgacctccacttccaggataccactgttggggtgttccatctacgctccccactgggccagtataagctgacctttgacaaagccagagaggcctgtgccaacgaagctgcgaccatggcaacctacaaccagctctcctatgcccagaagacctggtattcctttaccaaggaataaagcctttgatgccaggacccagactcaaggagaatctgaatctctgctctcctgcttgctggtcatgtggccttgatatcaagccac

SEQ ID NO: 226 - protein, 589 aa, Homo sapiens
VLRYHVVACHQLLLENLKLISNATSLQGEPIVISVSQSTVYINNKAKIISSDIISTNGIVHIIDKLLSPKNLLITPKDNSGRILQNLTTLATNNGYIKFSNLIQDSGLLSVITDPIHTPVTLFWPTDQALHALPAEQQDFLFNQDNKDKLKEYLKFHVIRDAKVLAVDLPTSTAWKTLQGSELSVKCGAGRDIGDLFLNGQTCRIVQRELLFDLGVAYGIDCLLIDPTLGGRCDTFTTFDASGECGSCVNTPSCPRWSKPKGVKQKCLYNLPFKRNLEGCRERCSLVIQIPRCCKGYFGRDCQACPGGPDAPCNNRGVCLDQYSATGECKCNTGFNGTACEMCWPGRFGPDCLPCGCSDHGQCDDGITGSGQCLCETGWTGPSCDTQAVLSAVCTPPCSAHATCKENNTCECNLDYEGDGITCTVVDFCKQDNGGCAKVARCSQKGTKVSCSCQKGYKGDGHSCTEIDPCADGLNGGCHEHATCKMTGPGKHKCECKSHYVGDGLNCEPEQLPIDRCLQDNGQCHADAKCVDLHFQDTTVGVFHLRSPLGQYKLTFDKAREACANEAATMATYNQLSYAQKTWYSFTKE

SEQ ID NO: 227 - DNA, 8495 bp, Homo sapiens
  CDS (210)..(7460)
  misc_feature (1311)..(1311): Wherein n may be a, c, g or t
  misc_feature (1312)..(1312): Wherein n may be a, c, g or t
  misc_feature (1313)..(1313): Wherein n may be a, c, g or t
  misc_feature (1314)..(1314): Wherein n may be a, c, g or t
  misc_feature (1315)..(1315): Wherein n may be a, c, g or t
  misc_feature (1316)..(1316): Wherein n may be a, c, g or t
  misc_feature (1311)..(1313): Wherein Xaa may be any naturally occurring amino acid
  misc_feature (1314)..(1316): Wherein Xaa may be any naturally occurring amino acid
aatcatcccacatgctaagaatctaagatgtataaaataaagtggtgaaagatgaaaatgaaattttatcaaggttagagtcaggttggagtggccattgtttaccaaactgagaaatctaaattttatttggttggtaattgagagtcattgagatattttggggaaggtcaccctgatgcctttgctaatcaaatgaaatgaatgaaatggagaggcaagaaactggaaatagcaagacgaggtatcatgctactgcaatagtccaggcaaaacatgataaaggcctcaacaagaatggcaccagtggagatgaagagcagaagatcaaggtgggagacagagacagagaaaacaaaggatttgatggcttattagatgtttggaatactttaaactttattcatccttgctttgctgtgtgcaactgtgtgcatggggtgtgcaacagtggactagatggcgatggaacctgtgagtgctactctgcgtacactggccccaagtgtgacaagctcacagaaaactttcacacctctcatctgacactgtggcctgtgcacgactccaagcactggggaagccttcgacatcagaatatgaatggcacctgttcttccgggggcggcaagggggatcccgatgtttatcaaaatgggttgattttccacggagggggtacttctggaggtctatcgtcatcacgaaacagacgaagtagtgtcaagcgtcctgagaagtggaagggggacgatcgagatggaggtggcaaggaaggccagcagcggcggcgggcagacacagagtcgagtcttcaaagaggtcacatcaaaacgcccctgccccacaggcaaggtgaagcgcggatcacggagacaacggggaattgtgtttctgctggcatgactggaaccaatgccaatcacacaaaagttcaccctacggttcagtccttgacagaatatgattcctttcagactcattccaccagcagactgaaggaatttgagaaacagcaggtgaaggaaagattttctgaccctcccctaatgcaggctataaaaccctcacatgagaagtaccctccttatgcccagagaaaaggaacatctttgtctccaaagacacagggacacggagatgatgaacaggccttgctaagtttcctccactctattacccttagcttgtacctttatccaaccacattcttccatgactctccagtcttcatcaaacctggcataaaaacactcagacttaaccacttctttgggtcttcatttccttatgaaggctccagtgtcatannnnnnatgggaattgaggtttggaaaaactggtgccaaaatgctgataccctggctgctgcccctgctccatccctgaatgtgcagccttgctctgcccagaaaattccagatgttcgccttccactgaagatgaaaacaaactggaatgcaaatgccttcccaattaccgaggcgatggcaaatactgcgaccccatcaatccatgtttacgaaaaatctgccaccctcatgctcattgtacgtacctgggaccaaatcggcacagttgtacatgccaagaaggctaccgtggggatggccaagtgtgcttgcctgtggacccctgccaaattaactttggaaactgccctacaaagtctacagtgtgcaaatatgatgggcctggacagatgcatttgccagaaaggttacgtgggtgatggcttaacgtgttatggaaacattatggagcgactcagagaattaaatactgaacccagaggaaaatggcaaggaaggctgacctctttcatctcactcctagaaagtatacaaattgtaagtgtacaactcagtgaattttcccaacgtgaacctacttgtgtaaacaccaagtccattgccagcaacctagaaggccccctggtccccctttccaatcattaccctctacaggtaaatgagcttttggtggataataaagctgctcaatactttgtgaaactccacataattgctggtcagatgaacatcgaatatatgaataacacagacatgttctacaccttgactggaaagtcgggggaaatcttcaacagcgataaggacaatcaaataaagcttaaactccatggaggcaaaaagaaggtaaaaattatacaaggggacatcattgcttccaatgggcttctgcacatccttgacagagccatggacaagttagaacccacatttgagagcaacaatgaggaaaccaatttgggacatgccttagatgaggatggagttggtggaccatacaccatttttgttccaaataatgaagcattgaataacatgaaggacggcactctcgattacctcctttctccagagcttgaagtggccactctcatctccacccctcacatcaggagcatggccaaccagctcatacagttcaacaccaccgacaatggacagattctggcaaatgatgtggcaatggaagaaattgagatcactgccaaaaatggccgaatttacacactgacaggagttctcattcctccctccattgtcccgattctgccccatcgatgtgatgaaacaaagagagagatgaaactgggcacttgtgtgagctgttctctggtgtactggagcagatgtcctgctaactctgagcccacagcactcttcacacacagatgtgtctacagtggcaggtttgggagcctgaagagcggctgtgcccggtactgcaatgccactgtgaagtgtgcagatagcctcggcggcaacgggacatgcatttgtgaggagggcttccaaggctcccagtgtcagttctgctctgatcccaataaatacggacctcggtgtaacaaaaaatgcctgtgcgttcacggaacatgcaataacaggatagacagcgatggggcctgcctcactggcacatgcagagacggctctgccgggagactctgtgataagcagacctcagcctgtgggccctacgtgcagttctgtcacatccacgccacctgtgaatacagcaatgggacagccagttgtatttgcaaagcaggatatgaaggagatggaactctgtgttctgagatggacccttgcacaggactaactccaggaggctgtagccgcaatgcagaatgcatcaaaactggcacgggcacccacacctgcgtgtgtcagcagggttggacagggaatgggagagactgctcggagatcaacaactgcctgctgcccagtgcaggcggctgccacgacaacgcatcctgtttgtatgtgggtcccgggcagaatgagtgtgagtgcaagaaaggatttcgaggaaatgggattgactgtgaaccaataacttcatgcttggaacaaaccgggaaatgtcatccattggcaagctgtcaatctacttcgtctggtgtctggagctgtgtttgtcaagagggctatgaaggagatggctttctgtgctatggaaacgcagcagtggaattgtcatttctctccgaagcagctatatttaaccgatggataaataatgcttctctacaacccacactgtcagccacctcaaacctcactgtcctcgtgccttcccaacaagctactgaggacatggaccaggatgagaaaagcttctggttgtcacagagcaatattccagccctaataaagtaccatatgctactaggcacatacagagtggcagatctgcagaccctgtcttcttctgacatgttggcaacatctttgcagggcaacttccttcacttggcaaaggtggatgggaatatcacaattgaaggggcctccattgtcgatggggacaacgcagccacaaatggagtgatacacatcatcaacaaggtgctggtcccacaaagacgtctaactggctccttaccaaacctgctcatgcggctggaacagatgcctgactattccatcttccggggctacatcattcaatataatctggcgaatgcaattgaggctgccgatgcctacacagtgtttgctccaaacaacaatgccatcgagaattacatcagggagaagaaagtcttgtctctagaggaggacgtcctccggtatcatgtggtcctggaggagaaactcctgaagaatgacctgcacaatggcatgcatcgtgagaccatgctgggtttctcctatttccttagcttctttctccataatgaccagctctatgtaaatgaggctccaataaactacaccaatgtagccactgataagggagtgatccatggtttgggaaaagttctggaaattcagaagaacagatgtgataataatgacactactattatacgaggaagatgtaggacatgctcctcagagctgacctgcccattcggaactaaatctctaggtaatgagaagaggagatgcatctatacctcctatttcatgggaagacgaaccctgtttattgggtgccagccaaaatgtgtgagaaccgtcattacgagagaatgctgtgccggcttctttggcccccaatgccagccctgcccagggaatgcccagaatgtctgctttggtaatggcatctgtttggatggagtgaatggcacaggtgtgtgtgagtgtggggagggcttcagcggcacagcctgcgagacctgcaccgagggcaagtacggcatccactgtgaccaagcatgttcttgtgtccatgggagatgcaaccaaggacccttgggagatggctcctgtgactgtgatgttggctggcgaggagtgcattgtgacaatgcaaccacagaagacaactgcaatgggacatgccataccagcgccaactgcctcaccaactcagatggtacagcttcatgcaagtgtgcagcaggattccaaggaaacgggaccatctgcacagcaatcaatgcctgtgagatcagcaatggaggttgctctgccaaggctgactgtaagagaaccaccccaggaaggcgagtgtgcacgtgcaaagcaggctacacgggtgatggcattgtgtgcctggaaatcaacccgtgtttggagaaccatggtggctgtgacaagaatgcggagtgcacacagacaggacccaaccaggctgcctgtaactgtttgccagcatacactggagatggaaaggtctgcacactcatcaatgtctgcttaactaaaaatggcggctgtagtgaatttgccatctgcaaccacactgggcaagtagaaaggacttgtacttgcaagccaaactacattggagatggatttacctgccgcggcagcatttatcaggagcttcccaagaacccgaaaacttcccagtatttcttccagttgcaggagcatttcgtgaaagatctggtcggcccaggccccttcactgtttttgcacctttatctgcagcctttgatgaggaagctcgggttaaagactgggacaaatacggtttaatgccccaggttcttcggtaccatgtggtcgcctgccaccagctgcttctggaaaacctgaaattgatctcaaatgctacttccctccaaggagagccaatagtcatctccgtctctcagagcacggtgtatataaacaataaggctaagatcatatccagtgatatcatcagtactaatgggattgttcatatcatagacaaattgctatctcccaaaaatttgcttatcactcccaaagacaactctggaagaattctgcaaaatcttacgactttggcaacaaacaatggctacatcaaatttagcaacttaatacaggactcaggtttgctgagtgtcatcaccgatcccatccacaccccagtcactctcttctggcccaccgaccaagccctccatgccctccatgccctacctgctgaacaacaggacttcctgttcaaccaagacaacaaggacaagctgaaggagtatttgaagtttcatgtgatacgagatgccaaggttttagctgtggatcttcccacatccactgcctggaagaccctgcaaggttcagagctgagtgtgaaatgtggagctggcagggacatcggtgacctctttctgaatggccaaacctacagaattgtgcagcgggagctcttgtttgacctgggtgtggcctacggcattgactgtctgctgattgatcccaccctggggggccgctgtgacacctttactactttcgatgcctcgggggagtgtgggagctgtgtcaatactcccagctgcccaaggtggagtaaaccaaagggtgtgaagcagaagtgtctctacaacctgcccttcaagaggaacctggaaggctgccgggagcggtgcagcctggtgatacagatccccaggtgctgcaagggctacttcgggcgagactgtcaggcctgccctggaggaccagatgccccgtgtaataaccggggtgtctgccttgatcagtactcggccaccggagagtgtaaatgcaacaccggcttcaatgggacggcgtgtgagatgtgctggccggggagatttgggcctgattgtctgccctgtggctgctcagaccacggacagtgcgatgatggcatcacgggctccgggcagtgcctctgtgaaacggggtggacaggcccctcgtgtgacactcaggcagttttgcctgcagtgtgtacgcctccttgttctgctcatgccacctgtaaggagaacaacacgtgtgagtgtaacctggattatgaaggtgacggaatcacatgcacagttgtggatttctgcaaacaggacaacgggggctgtgcaaaggtggccagatgctcccagaagggcacgaaggtctcctgcagctgccagaagggatacaaaggggacgggcacagctgcacagagatagacccctgtgcagacggccttaacggagggtgtcacgagcacgccacctgtaagatgacaggcccgggcaagcacaagtgtgagtgtaaaagtcactatgtcggagatgggctgaactgtgagccggagcagctgcccattgaccgctgcttacaggacaatgggcagtgccatgcagacgccaaatgtgtcgacctccacttccaggataccactgttggggtgttccatctacgctccccactgggccagtataagctgacctttgacaaagccagagaggcctgtgccaacgaagctgcgaccatggcaacctacaaccagctctcctatgcccagaaggccaagtaccacctgtgctcagcaggctggctggagaccgggcgggttgcctaccccacagccttcgcctcccagaactgtggctctggtgtggttgggatagtggactatggacctagacccaacaagagtgaaatgtgggatgtcttctgctatcggatgaaaggaagtgctggcctattccaacagctcagctcgaggccgtgcatttctagaacacctgactgacctgtccatccgcggcaccctctttgtgccacagaacagtgggctgggggagaatgagaccttgtctgggcgggacatcgagcaccacctcgccaatgtcagcatgtttttctacaatgaccttgtcaatggcaccaccctgcaaacgaggctgggaagcaagctgctcatcactgccagccaggacccactccaaccgacggagaccaggtttgttgatggaagagccattctgcagtgggacatctttgcctccaatgggatcattcatgtcatttccaggcctttaaaagcaccccctgcccccgtgaccttgacccacactggcttgggagcagggatcttctttgccatcatcctggtgactggggctgttgccttggctgcttactcctactttcggataaaccggagaacaatcggcttccagcattttgagtcggaagaggacattaatgttgcagctcttggcaagcagcagcctgagaatatctcgaaccccttgtatgagagcacaacctcagctcccccagaaccttcctacgaccccttcacggactctgaagaacggcagcttgagggcaatgaccccttgaggacactgtgagggcctggacgggagatgccagccatcactcactgccacctgggccatcaactgtgaattctcagcaccagttgccttttaggaacgtaaagtcctttaagcactcagaagccatacctcatctctctggctgatctgggggttgtttctgtgggtgagagatgtgttgctgtgcccacccagtacagcttcctcctctgaccctttggctcttcttcctttgtactcttcagctggcacctgctccattctgccctacatgatgggtaactgtgatctttcttccctgttagattgtaagcctccgtctttgtatcccagcccctagcccagtgcctgacacaggaactgtgcacaataaaggtttatggaacagaaacaaagtcaaaaaaaaaaaaaaaaaaaaaaaaaaaaaaaaaaaaaac

SEQ ID NO: 228 - protein, 2417 aa, Homo sapiens
  misc_feature (368)..(368): Wherein Xaa may be any naturally occurring amino acid
  misc_feature (369)..(369): Wherein Xaa may be any naturally occurring amino acid
MERQETGNSKTRYHATAIVQAKHDKGLNKNGTSGDEEQKIKVGDRDRENKGFDGLLDVWNTLNFIHPCFAVCNCVHGVCNSGLDGDGTCECYSAYTGPKCDKLTENFHTSHLTLWPVHDSKHWGSLRHQNMNGTCSSGGGKGDPDVYQNGLIFHGGGTSGGLSSSRNRRSSVKRPEKWKGDDRDGGGKEGQQRRRADTESSLQRGHIKTPLPHRQGEARITETTGNCVSAGMTGTNANHTKVHPTVQSLTEYDSFQTHSTSRLKEFEKQQVKERFSDPPLMQAIKPSHEKYPPYAQRKGTSLSPKTQGHGDDEQALLSFLHSITLSLYLYPTTFFHDSPVFIKPGIKTLRLNHFFGSSFPYEGSSVIXXMGIEVWKNWCQNADTLAAAPAPSLNVQPCSAQKIPDVRLPLKMKTNWNANAFPITEAMANTATPSIHVYEKSATLMLIVRTWDQIGTVVHAKKATVGMAKCACLWTPAKLTLETALQSLQCANMMGLDRCICQKGYVGDGLTCYGNIMERLRELNTEPRGKWQGRLTSFISLLESIQIVSVQLSEFSQREPTCVNTKSIASNLEGPLVPLSNHYPLQVNELLVDNKAAQYFVKLHIIAGQMNIEYMNNTDMFYTLTGKSGEIFNSDKDNQIKLKLHGGKKKVKIIQGDIIASNGLLHILDRAMDKLEPTFESNNEETNLGHALDEDGVGGPYTIFVPNNEALNNMKDGTLDYLLSPELEVATLISTPHIRSMANQLIQFNTTDNGQILANDVAMEEIEITAKNGRIYTLTGVLIPPSIVPILPHRCDETKREMKLGTCVSCSLVYWSRCPANSEPTALFTHRCVYSGRFGSLKSGCARYCNATVKCADSLGGNGTCICEEGFQGSQCQFCSDPNKYGPRCNKKCLCVHGTCNNRIDSDGACLTGTCRDGSAGRLCDKQTSACGPYVQFCHIHATCEYSNGTASCICKAGYEGDGTLCSEMDPCTGLTPGGCSRNAECIKTGTGTHTCVCQQGWTGNGRDCSEINNCLLPSAGGCHDNASCLYVGPGQNECECKKGFRGNGIDCEPITSCLEQTGKCHPLASCQSTSSGVWSCVCQEGYEGDGFLCYGNAAVELSFLSEAAIFNRWINNASLQPTLSATSNLTVLVPSQQATEDMDQDEKSFWLSQSNIPALIKYHMLLGTYRVADLQTLSSSDMLATSLQGNFLHLAKVDGNITIEGASIVDGDNAATNGVIHIINKVLVPQRRLTGSLPNLLMRLEQMPDYSIFRGYIIQYNLANAIEAADAYTVFAPNNNAIENYIREKKVLSLEEDVLRYHVVLEEKLLKNDLHNGMHRETMLGFSYFLSFFLHNDQLYVNEAPINYTNVATDKGVIHGLGKVLEIQKNRCDNNDTTIIRGRCRTCSSELTCPFGTKSLGNEKRRCIYTSYFMGRRTLFIGCQPKCVRTVITRECCAGFFGPQCQPCPGNAQNVCFGNGICLDGVNGTGVCECGEGFSGTACETCTEGKYGIHCDQACSCVHGRCNQGPLGDGSCDCDVGWRGVHCDNATTEDNCNGTCHTSANCLTNSDGTASCKCAAGFQGNGTICTAINACEISNGGCSAKADCKRTTPGRRVCTCKAGYTGDGIVCLEINPCLENHGGCDKNAECTQTGPNQAACNCLPAYTGDGKVCTLINVCLTKNGGCSEFAICNHTGQVERTCTCKPNYIGDGFTCRGSIYQELPKNPKTSQYFFQLQEHFVKDLVGPGPFTVFAPLSAAFDEEARVKDWDKYGLMPQVLRYHVVACHQLLLENLKLISNATSLQGEPIVISVSQSTVYINNKAKIISSDIISTNGIVHIIDKLLSPKNLLITPKDNSGRILQNLTTLATNNGYIKFSNLIQDSGLLSVITDPIHTPVTLFWPTDQALHALHALPAEQQDFLFNQDNKDKLKEYLKFHVIRDAKVLAVDLPTSTAWKTLQGSELSVKCGAGRDIGDLFLNGQTYRIVQRELLFDLGVAYGIDCLLIDPTLGGRCDTFTTFDASGECGSCVNTPSCPRWSKPKGVKQKCLYNLPFKRNLEGCRERCSLVIQIPRCCKGYFGRDCQACPGGPDAPCNNRGVCLDQYSATGECKCNTGFNGTACEMCWPGRFGPDCLPCGCSDHGQCDDGITGSGQCLCETGWTGPSCDTQAVLPAVCTPPCSAHATCKENNTCECNLDYEGDGITCTVVDFCKQDNGGCAKVARCSQKGTKVSCSCQKGYKGDGHSCTEIDPCADGLNGGCHEHATCKMTGPGKHKCECKSHYVGDGLNCEPEQLPIDRCLQDNGQCHADAKCVDLHFQDTTVGVFHLRSPLGQYKLTFDKAREACANEAATMATYNQLSYAQKAKYHLCSAGWLETGRVAYPTAFASQNCGSGVVGIVDYGPRPNKSEMWDVFCYRMKGSAGLFQQLSSRPCISRTPD

SEQ ID NO: 229 - DNA, 1599 bp, Homo sapiens
  CDS (1)..(1599)
agaattctgcaaaatcttacgactttggcaacaaacaatggctacatcaaatttagcaacttaatacaggactcaggtttgctgagtgtcatcaccgatcccatccacaccccagtcactctcttctggcccaccgaccaagccctccatgccctacctgctgaacaacaggacttcctgttcaaccaagacaacaaggacaagctgaaggagtatttgaagtttcatgtgatacgagatgccaaggttttagctgtggatcttcccacatccactgcctggaagaccctgcaaggttcagagctgagtgtgaaatgtggagctggcagggacatcggtgacctctttctgaatggccaaacctgcagaattgtgcagcgggagctcttgtttgacctgggtgtggcctacggcattgactgtctgctgattgatcccaccctggggggccgctgtgacacctttactactttcgatgcctcgggtgtgaagcagaagtgtctctacaacctgcccttcaagaggaacctggaaggctgccgggagcggtgcagcctggtgatacagatccccaggtgctgcaagggctacttcgggcgagactgtcaggcctgccctggaggaccagatgccccgtgtaataaccggggtgtctgccttgatcagtactcggccaccggagagtgtaaatgcaacaccggcttcaatgggacggcgtgtgagatgtgctggccggggagattcgggcctgattgtctgccctgtggctgctcagaccacggacagtgcgatgatggcatcacgggctccgggcagtgcctctgtgaaacggggtggacaggcccctcgtgtgacactcaggcagttttgcctgcagtgtgtacgcctccttgttctgctcatgccacctgtaaggagaacaacacgtgtgagtgtaacctggattatgaaggtgacggaatcacatgcacagttgtggatttctgcaaacaggacaacgggggctgtgcaaaggtggccagatgctcccagaagggcacgaaggtctcctgcagctgccagaagggatacaaaggggacgggcacagctgcacagagatagacccctgtgcagacggccttaacggagggtgtcacgagcacgccacctgtaagatgacaggcccgggcaagcacaagtgtgagtgtaaaagtcactatgtcggagatgggctgaactgtgagccggagcagctgcccattgaccgctgcttacaggacaatgggcagtgccatgcagacgccaaatgtgtcgacctccacttccaggataccactgttggggtgttccatctacgctccccactgggccagtataagctgacctttgacaaagccagagaggcctgtgccaacgaagctgcgaccatggcaacctacaaccagctctcctatgcccagaaggccaagtaccacctgtgctcagcaggctggctggagaccgggcgggttgcctaccccacagccttcgcctcccagaactgtggctctggtgtggttgggatagtggactatggacctagacccaacaagagtgaaatgtgggatgtcttctgctat

SEQ ID NO: 230 - protein, 533 aa, Homo sapiens
RILQNLTTLATNNGYIKFSNLIQDSGLLSVITDPIHTPVTLFWPTDQALHALPAEQQDFLFNQDNKDKLKEYLKFHVIRDAKVLAVDLPTSTAWKTLQGSELSVKCGAGRDIGDLFLNGQTCRIVQRELLFDLGVAYGIDCLLIDPTLGGRCDTFTTFDASGVKQKCLYNLPFKRNLEGCRERCSLVIQIPRCCKGYFGRDCQACPGGPDAPCNNRGVCLDQYSATGECKCNTGFNGTACEMCWPGRFGPDCLPCGCSDHGQCDDGITGSGQCLCETGWTGPSCDTQAVLPAVCTPPCSAHATCKENNTCECNLDYEGDGITCTVVDFCKQDNGGCAKVARCSQKGTKVSCSCQKGYKGDGHSCTEIDPCADGLNGGCHEHATCKMTGPGKHKCECKSHYVGDGLNCEPEQLPIDRCLQDNGQCHADAKCVDLHFQDTTVGVFHLRSPLGQYKLTFDKAREACANEAATMATYNQLSYAQKAKYHLCSAGWLETGRVAYPTAFASQNCGSGVVGIVDYGPRPNKSEMWDVFCY

SEQ ID NO: 231 - DNA, 1611 bp, Homo sapiens
  CDS (7)..(1605)
ggatccagaattctgcaaaatcttacgactttggcaacaaacaatggctacatcaaatttagcaacttaatacaggactcaggtttgctgagtgtcatcaccgatcccatccacaccccagtcactctcttctggcccaccgaccaagccctccatgccctacctgctgaacaacaggacttcctgttcaaccaagacaacaaggacaagctgaaggagtatttgaagtttcatgtgatacgagatgccaaggttttagctgtggatcttcccacatccactgcctggaagaccctgcaaggttcagagctgagtgtgaaatgtggagctggcagggacatcggtgacctctttctgaatggccaaacctgcagaattgtgcagcgggagctcttgtttgacctgggtgtggcctacggcattgactgtctgctgattgatcccaccctggggggccgctgtgacacctttactactttcgatgcctcgggtgtgaagcagaagtgtctctacaacctgcccttcaagaggaacctggaaggctgccgggagcggtgcagcctggtgatacagatccccaggtgctgcaagggctacttcgggcgagactgtcaggcctgccctggaggaccagatgccccgtgtaataaccggggtgtctgccttgatcagtactcggccaccggagagtgtaaatgcaacaccggcttcaatgggacggcgtgtgagatgtgctggccggggagattcgggcctgattgtctgccctgtggctgctcagaccacggacagtgcgatgatggcatcacgggctccgggcagtgcctctgtgaaacggggtggacaggcccctcgtgtgacactcaggcagttttgcctgcagtgtgtacgcctccttgttctgctcatgccacctgtaaggagaacaacacgtgtgagtgtaacctggattatgaaggtgacggaatcacatgcacagttgtggatttctgcaaacaggacaacgggggctgtgcaaaggtggccagatgctcccagaagggcacgaaggtctcctgcagctgccagaagggatacaaaggggacgggcacagctgcacagagatagacccctgtgcagacggccttaacggagggtgtcacgagcacgccacctgtaagatgacaggcccgggcaagcacaagtgtgagtgtaaaagtcactatgtcggagatgggctgaactgtgagccggagcagctgcccattgaccgctgcttacaggacaatgggcagtgccatgcagacgccaaatgtgtcgacctccacttccaggataccactgttggggtgttccatctacgctccccactgggccagtataagctgacctttgacaaagccagagaggcctgtgccaacgaagctgcgaccatggcaacctacaaccagctctcctatgcccagaaggccaagtaccacctgtgctcagcaggctggctggagaccgggcgggttgcctaccccacagccttcgcctcccagaactgtggctctggtgtggttgggatagtggactatggacctagacccaacaagagtgaaatgtgggatgtcttctgctatcggccg

SEQ ID NO: 232 - protein, 533 aa, Homo sapiens; identical to SEQ ID NO: 230

SEQ ID NO: 233 - DNA, 1668 bp, Homo sapiens
  CDS (7)..(1662)
ggatccagaattctgcaaaatcttacgactttggcaacaaacaatggctacatcaaatttagcaacttaatacaggactcaggtttgctgagtgtcatcaccgatcccatccacaccccagtcactctcttctggcccaccgaccaagccctccatgccctacctgctgaacaacaggacttcctgttcaaccaagacaacaaggacaagctgaaggagtatttgaagtttcatgtgatacgagatgccaaggttttagctgtggatcttcccacatccactgcctggaagaccctgcaaggttcagagctgagtgtgaaatgtggagctggcagggacatcggtgacctctttctgaatggccaaacctgcagaattgtgcagcgggagctcttgtttgacctgggtgtggcctacggcattgactgtctgctgattgatcccaccctggggggccgctgtgacacctttactactttcgatgcctcgggggagtgtgggagctgtgtcaatactcccagctgcccaaggtggagtaaaccaaagggtgtgaagcagaagtgtctctacaacctgcccttcaagaggaacctggaaggctgccgggagcggtgcagcctggtgatacagatccccaggtgctgcaagggctacttcgggcgagactgtcaggcctgccctggaggaccagatgccccgtgtaataaccggggtgtctgccttgatcagtactcggccaccggagagtgtaaatgcaacaccggcttcaatgggacggcgtgtgagatgtgctggccggggagattcgggcctgattgtctgccctgtggctgctcagaccacggacagtgcaatgatggcatcacgggctccgggcagtgcctctgtgaaacggggtggacaggcccctcgtgtgacactcaggcagttttgcctgcagtgtgtacgcctccttgttctgctcatgccacctgtaaggagaacaacacgtgtgagtgtaacctggattatgaaggtgacggaatcacatgcacagttgtggatttctgcaaacaggacaacgggggctgtgcaaaggtggccagatgctcccagaagggcacgaaggtctcctgcagctgccagaagggatacaaaggggacgggcacagctgcacagagatagacccttgtgcagacggccttaacggagggtgtcacgagcacgccacctgtaagatgacaggcccgggcaagcacaagtgtgagtgtaaaagtcactatgtcggagatgggctgaactgtgagccggagcagctgcccattgaccgctgcttacaggacaatgggcagtgccatgcagacgccaaatgtgtcgacctccacttccaggataccactgttggggtgttccatctacgctccccactgggccagtataagctgacctttgacagagccagagaggcctgtgccaacgaagctgcgaccatggcaacctacaaccagctctcctatgcccagaaggccaagtaccacctgtgctcagcaggctggctggagaccgggcgggttgcctaccccacagccttcgcctcccagaactgtggctctggtgtggttgggatagtggactatggacctagacccaacaagagtgaaatgtgggatgtcttctgctatcggccg

SEQ ID NO: 234 - protein, 552 aa, Homo sapiens
RILQNLTTLATNNGYIKFSNLIQDSGLLSVITDPIHTPVTLFWPTDQALHALPAEQQDFLFNQDNKDKLKEYLKFHVIRDAKVLAVDLPTSTAWKTLQGSELSVKCGAGRDIGDLFLNGQTCRIVQRELLFDLGVAYGIDCLLIDPTLGGRCDTFTTFDASGECGSCVNTPSCPRWSKPKGVKQKCLYNLPFKRNLEGCRERCSLVIQIPRCCKGYFGRDCQACPGGPDAPCNNRGVCLDQYSATGECKCNTGFNGTACEMCWPGRFGPDCLPCGCSDHGQCNDGITGSGQCLCETGWTGPSCDTQAVLPAVCTPPCSAHATCKENNTCECNLDYEGDGITCTVVDFCKQDNGGCAKVARCSQKGTKVSCSCQKGYKGDGHSCTEIDPCADGLNGGCHEHATCKMTGPGKHKCECKSHYVGDGLNCEPEQLPIDRCLQDNGQCHADAKCVDLHFQDTTVGVFHLRSPLGQYKLTFDRAREACANEAATMATYNQLSYAQKAKYHLCSAGWLETGRVAYPTAFASQNCGSGVVGIVDYGPRPNKSEMWDVFCY

SEQ ID NO: 235 - DNA, 1668 bp, Homo sapiens
  CDS (7)..(1662)
ggatccagaattctgcaaaatcttacgactttggcaacaaacaatggctacatcaaatttagcaacttaatacaggactcaggtttgctgagtgtcatcaccgatcccatccacaccccagtcactctcttctggcccaccgaccaagccctccatgccctacctgctgaacaacaggacttcctgttcaaccaagacaacaaggacaagctgaaggagtatttgaagtttcatgtgatacgagatgccaaggttttagctgtggatcttcccacatccactgcctggaagaccctgcaaggttcagagctgagtgtgaaatgtggagctggcagggacatcggtgacctctttctgaatggccaaacctgcagaattgtgcagcgggagctcttgtttgacctgggtgtggcctacggcattgactgtctgctgattgatcccaccctggggggccgctgtgacaccttcactactttcgatgcctcgggggagtgtgggagctgtgtcaatactcccagctgcccaaggtggagtaaaccaaagggtgtgaagcagaagtgtctctacaacctgcccttcaagaggaacctggaaggctgccgggagcggtgcagcctggtgatacagatccccaggtgctgcaagggctacttcgggcgagactgtcaggcctgccctggaggaccagatgccccgtgtaataaccggggtgtctgccttgatctgtactcggccaccggagagtgtaaatgcaacaccggcttcaatgggacggcgtgtgagatgtgctggccggggagattcgggcctgattgtctgccctgtggctgctcagaccacggacagtgcgatgatggcatcacgggctccgggcagtgcctctgtgaaacggggtggacaggcccctcgtgtgacactcaggcagttttgcctgcagtgtgtacgcctccttgttctgctcatgccacctgtaaggagaacaacacgtgtgagtgtaacctggattatgaaggtgacggaatcacatgcacagttgtggatttctgcaaacaggacaacgggggctgtgcaaaggtggccagatgctcccagaagggcacgaaggtctcctgcagctgccagaagggatacaaaggggacgggcacagctgcacagagatagacccctgtgcagacggccttaacggagggtgtcacgagcacgccacctgtaagatgacaggcccgggcaagcacaagtgtgagtgtaaaagtcactatgtcggagatgggctgaactgtgagccggagcagctgcccattgaccgctgcttacaggacaatgggcagtgccatgcagacgccaaatgtgtcgacctccacttccaggataccactgttggggtgttccatctacgctccccactgggccagtataagctgacctttgacaaagccagagaggcctgtgccaacgaagctgcgaccatggcaacctacaaccagctctcctatgcccagaaggccaagtaccacctgtgctcagcaggctggctggagaccgggcgggttgcctaccccacagccttcgcctcccagaactgtggctctggtgtggttgggatagtggactatggacctagacccaacaagagtgaaatgtgggatgtcttctgctatcggccg

SEQ ID NO: 236 - protein, 552 aa, Homo sapiens
RILQNLTTLATNNGYIKFSNLIQDSGLLSVITDPIHTPVTLFWPTDQALHALPAEQQDFLFNQDNKDKLKEYLKFHVIRDAKVLAVDLPTSTAWKTLQGSELSVKCGAGRDIGDLFLNGQTCRIVQRELLFDLGVAYGIDCLLIDPTLGGRCDTFTTFDASGECGSCVNTPSCPRWSKPKGVKQKCLYNLPFKRNLEGCRERCSLVIQIPRCCKGYFGRDCQACPGGPDAPCNNRGVCLDLYSATGECKCNTGFNGTACEMCWPGRFGPDCLPCGCSDHGQCDDGITGSGQCLCETGWTGPSCDTQAVLPAVCTPPCSAHATCKENNTCECNLDYEGDGITCTVVDFCKQDNGGCAKVARCSQKGTKVSCSCQKGYKGDGHSCTEIDPCADGLNGGCHEHATCKMTGPGKHKCECKSHYVGDGLNCEPEQLPIDRCLQDNGQCHADAKCVDLHFQDTTVGVFHLRSPLGQYKLTFDKAREACANEAATMATYNQLSYAQKAKYHLCSAGWLETGRVAYPTAFASQNCGSGVVGIVDYGPRPNKSEMWDVFCY

SEQ ID NO: 237 - DNA, 1668 bp, Homo sapiens
  CDS (7)..(1662)
ggatccagaattctgcaaaatcttacgactttggcaacaaacaatggctacatcaaatttagcaacttaatacaggactcaggtttgctgagtgtcatcaccgatcccatccacaccccagtcactctcttctggcccaccgaccaagccctccatgccctacctgctgaacaacaggacttcctgttcaaccaagacaacaaggacaagctgaaggagtatttgaagtttcatgtgatacgagatgccaaggttttagctgtggatcttcccacatccactgcctggaagaccctgcaaggttcagagctgagtgtgaaatgtggagctggcagggacatcggtgacctctttctgaatggccaaacctgcagaattgtgcagcgggagctcttgtttgacctgggtgtggcctacggcattgactgtctgctgattgatcccaccctggggggccgctgtgacacctttactactttcgatgcctcgggggagtgtgggagctgtgtcaatactcccagctgcccaaggtggagtaaaccaaagggtgtgaagcagaagtgtctctacaacctgcccttcaagaggaacctggaaggctgccgggagcggtgcagtctggtgatacagatccccaggtgctgcaagggctacttcgggcgagactgtcaggcctgccctggaggaccagatgccccgtgtaataaccggggtgtctgccttgatcagtactcggccaccggagagtgtaaatgcaacaccggcttcaatgggacggcgtgtgagatgtgctggccggggagattcgggcctgattgtctgccctgcggctgctcagaccacggacagtgcgatgatggcatcacgggctccgggcagtgcctctgtgaaacggggtggacaggcccctcgtgtgacactcaggcagttttgcctgcagtgtgtacgcctccttgttctgctcatgccacctgtaaggagaacaacacgtgtgagtgtaacctggattatgaaggtgacggaatcacatgcacagttgtggatttctgcaaacaggacaacgggggctgtgcaaaggtggccagatgctcccagaagggcacgaaggtctcctgcagctgccagaagggatacaaaggggacgggcacagctgcacagagatagacccctgtgcagacggccttaacggagggtgtcacgagcacgccacctgtaagatgacaggcccgggcaagcacaagtgtgagtgtaaaagtcactatgtcggagatgggctgaactgtgagccggagcagctgcccattgaccgctgcttacaggacaatgggcagtgccatgcagacgccaaatgtgtcgacctccacttccaggataccactgttggggtgttccatctacgctccccactgggccagtataagctgacctttgacaaagccagagaggcctgtgccaacgaagctgcgaccatggcaacctacaaccagctctcctatgcccagaaggccaagtaccacctgtgctcagcaggctggctggagaccgggcgggttgcctaccccacagccttcgcctcccagaactgtggctctggtgtggttgggatagtggactatggacctagacccaacaagagtgaaatgtgggatgtcttctgctatcggccg

SEQ ID NO: 238 - protein, 552 aa, Homo sapiens
RILQNLTTLATNNGYIKFSNLIQDSGLLSVITDPIHTPVTLFWPTDQALHALPAEQQDFLFNQDNKDKLKEYLKFHVIRDAKVLAVDLPTSTAWKTLQGSELSVKCGAGRDIGDLFLNGQTCRIVQRELLFDLGVAYGIDCLLIDPTLGGRCDTFTTFDASGECGSCVNTPSCPRWSKPKGVKQKCLYNLPFKRNLEGCRERCSLVIQIPRCCKGYFGRDCQACPGGPDAPCNNRGVCLDQYSATGECKCNTGFNGTACEMCWPGRFGPDCLPCGCSDHGQCDDGITGSGQCLCETGWTGPSCDTQAVLPAVCTPPCSAHATCKENNTCECNLDYEGDGITCTVVDFCKQDNGGCAKVARCSQKGTKVSCSCQKGYKGDGHSCTEIDPCADGLNGGCHEHATCKMTGPGKHKCECKSHYVGDGLNCEPEQLPIDRCLQDNGQCHADAKCVDLHFQDTTVGVFHLRSPLGQYKLTFDKAREACANEAATMATYNQLSYAQKAKYHLCSAGWLETGRVAYPTAFASQNCGSGVVGIVDYGPRPNKSEMWDVFCY

SEQ ID NO: 239 - DNA, 1668 bp, Homo sapiens
  CDS (7)..(1662)
ggatccagaattctgcaaaatcttacgactttggcaacaaacaatggctacatcaaatttagcaacttaatacaggactcaggtttgctgagtgtcatcaccgatcccatccacaccccagtcactctcttctggcccaccgaccaagccctccatgccctacctgctgaacaacaggacttcctgttcaaccaagacaacaaggacaagctgaaggagtatttgaagtttcatgtgatacgagatgccaaggttttagctgtggatcttcccacatccactgcctggaagaccctgcaaggttcagagctgagtgtgaaatgtggagctggcagggacatcggtgacctctttctgaatggccaaacctgcagaattgtgcagcgggagctcttgtttgacctgggtgtggcctacggcattgactgtctgctgattgatcccaccctggggggccgctgtgacacctttactactttcgatgcctcgggggagtgtgggagctgtgtcaatactcccagctgcccaaggtggagtaaaccaaagggtgtgaagcagaagtgtctctacaacctgcccttcaagaggaacctggaaggctgccgggagcggtgcagcctggtgatacagatccccaggtgctgcaagggctacttcgggcgagactgtcaggcctgccctggaggaccagatgccccgtgtaataaccggggtgtctgccttgatcagtactcggccaccggagagtgtaaatgcaacaccggcttcaatgggacggcgtgtgagatgtgctggccggggagatttgggcctgattgtctgccctgtggctgctcagaccacggacagtgcgatgatggcatcacgggctccgggcagtgcctctgtgaaacggggtggacaggcccctcgtgtgacactcaggcagttttgcctgcagtgtgtacgcctccttgttctgctcatgccacctgtaaggagaacaacacgtgtgagtgttacctggattatgaaggtgacggaatcacatgcacagttgtggatttctgcaaacaggacaacgggggctgtgcaaaggtggccagatgctcccagaagggcacgaaggtctcctgcagctgccagaagggatacaaaggggacgggcacagctgcacagagatagacccctgtgcagacggccttaacggagggtgtcacgagcacgccacccgtaagatgacaggcccgggcaagcacaagtgtgagtgtaaaagtcactatgtcggagatgggctgaactgtgagccggagcagctgcccattgaccgctgcttacaggacaatgggcagtgccatgcagacgccaaatgtgtcgacctccacttccaggataccactgttggggtgttccatctacgctccccactgggccagtataagctgacctttgacaaagccagagaggcctgtgccaacgaagctgcgaccatggcaacctacaaccagctctcctatgcccagaaggccaagtaccacctgtgctcagcaggctggctggagaccgggcgggttgcctaccccacagccttcgcctcccagaactgtggctctggtgtggttgggatagtggactatggacctagacccaacaagagtgaaatgtgggatgtcttctgctatcggccg

SEQ ID NO: 240 - protein, 552 aa, Homo sapiens
RILQNLTTLATNNGYIKFSNLIQDSGLLSVITDPIHTPVTLFWPTDQALHALPAEQQDFLFNQDNKDKLKEYLKFHVIRDAKVLAVDLPTSTAWKTLQGSELSVKCGAGRDIGDLFLNGQTCRIVQRELLFDLGVAYGIDCLLIDPTLGGRCDTFTTFDASGECGSCVNTPSCPRWSKPKGVKQKCLYNLPFKRNLEGCRERCSLVIQIPRCCKGYFGRDCQACPGGPDAPCNNRGVCLDQYSATGECKCNTGFNGTACEMCWPGRFGPDCLPCGCSDHGQCDDGITGSGQCLCETGWTGPSCDTQAVLPAVCTPPCSAHATCKENNTCECYLDYEGDGITCTVVDFCKQDNGGCAKVARCSQKGTKVSCSCQKGYKGDGHSCTEIDPCADGLNGGCHEHATRKMTGPGKHKCECKSHYVGDGLNCEPEQLPIDRCLQDNGQCHADAKCVDLHFQDTTVGVFHLRSPLGQYKLTFDKAREACANEAATMATYNQLSYAQKAKYHLCSAGWLETGRVAYPTAFASQNCGSGVVGIVDYGPRPNKSEMWDVFCY

SEQ ID NO: 241 - DNA, 1668 bp, Homo sapiens
  CDS (7)..(1662)
ggatccagaattctgcaaaatcttacgactttggcaacaaacaatggctacatcaaatttagcaacttaatacaggactcaggtttgctgagtgtcatcaccgatcccatccacaccccagtcactctcttctggcccaccgaccaagccctccatgccctacctgctgaacaacaggacttcctgttcaaccaagacaacaaggacaagctgaaggagtatttgaagtttcatgtgatacgagatgccaaggttttagctgtggatcttcccacatccactgcctggaagaccctgcaaggttcagagctgagtgtgaaatgtggagctggcagggacatcggtgacctctttctgaatggccaaacctgcagaattgtgcagcgggagctcttgtttgacctgggtgtggcctacggcattgactgtctgctgattgatcccaccctggggggccgctgtgacacctttactactttcgatgcctcgggggagtgtgggagctgtgtcaatactcccagctgcccaaggtggagtaaaccaaagggtgtgaagcagaagtgtctctacaacctgcccttcaagaggaacctggaaggctgccgggagcggtgcagcctggtgatacagatccccaggtgctgcaagggctacttcgggcgagactgtcaggcctgccctggaggaccagatgccccgtgtaataaccggggtgtctgccttgatcagtactcggccaccggagagtgtaaatgcaacaccggcttcaatgggacggcgtgtgagatgtgctggccggggagattcgggcctgattgtctgccctgtggctgctcagaccacggacagtgcgatgatggcatcacgggctccgggcagtgcctctgtgaaacggggtggacaggcccctcgtgtgacactcaggcagttttgcctgcagtgtgtacgcctccttgttctgctcatgccacctgtaaggagaacaacacgtgtgagtgtaacctggattatgaaggtgacggaatcacatgcacagttgtggatttctgcaaacaggacaacgggggctgtgcaaaggtggccagatgctcccagaagggcacgaaggtctcctgcaactgccagaaggggtacaaaggggacgggcacagctgcacagagatagacccctgtgcagacggccttaacggagggtgtcacgagcacgccacctgtaagatgacaggcccgggcaagcacaagtgtgagtgtaaaagtcactatgtcggagatgggctgaactgtgagccggagcagctgcccattgaccgctgcttacaggacaatgggcagtgccatgcagacgccaaatgtgtcgacctccacttccaggataccactgttggggtgttccatctacgctccccactgggccagtataagctgacctttgacaaagccagagaggcctgtgccaacgaagctgcgaccatggcaacctacaaccagctctcctatgcccagaaggccaagtaccacctgtgctcagcaggctggctggagaccgggcgggttgcctaccccacagccttcgcctcccagaactgtggctctggtgtggttgggatagtggactatggacctagacccaacaagagtgaaatgtgggatgtcttctgctatcggccg

SEQ ID NO: 242 - protein, 552 aa, Homo sapiens
RILQNLTTLATNNGYIKFSNLIQDSGLLSVITDPIHTPVTLFWPTDQALHALPAEQQDFLFNQDNKDKLKEYLKFHVIRDAKVLAVDLPTSTAWKTLQGSELSVKCGAGRDIGDLFLNGQTCRIVQRELLFDLGVAYGIDCLLIDPTLGGRCDTFTTFDASGECGSCVNTPSCPRWSKPKGVKQKCLYNLPFKRNLEGCRERCSLVIQIPRCCKGYFGRDCQACPGGPDAPCNNRGVCLDQYSATGECKCNTGFNGTACEMCWPGRFGPDCLPCGCSDHGQCDDGITGSGQCLCETGWTGPSCDTQAVLPAVCTPPCSAHATCKENNTCECNLDYEGDGITCTVVDFCKQDNGGCAKVARCSQKGTKVSCNCQKGYKGDGHSCTEIDPCADGLNGGCHEHATCKMTGPGKHKCECKSHYVGDGLNCEPEQLPIDRCLQDNGQCHADAKCVDLHFQDTTVGVFHLRSPLGQYKLTFDKAREACANEAATMATYNQLSYAQKAKYHLCSAGWLETGRVAYPTAFASQNCGSGVVGIVDYGPRPNKSEMWDVFCY

SEQ ID NO: 243 - DNA, 1668 bp, Homo sapiens
  CDS (7)..(1662)
ggatccagaattctgcaaaatcttacgactttggcaacaaacaatggctacatcaaatttagcaacttaatacaggactcaggtttgctgagtgtcatcaccgatcccatccacaccccagtcactctcttctggcccaccgaccaagccctccatgccctacctgctgaacaacaggacttcctgttcaaccaagacaacaaggacaagctgaaggagtatttgaagtttcatgtgatacgagatgccaaggttttagctgtggatcttcccacatccactgcctggaagaccctgcaaggttcagagctgagtgtgaaatgtggagctggcagggacatcggtgacctctttctgaatggccaaacctgcagaattgtgcagcgggagctcttgtttgacctgggtgtggcctacggcattgactgtctgctgattgatcccaccctggggggccgctgtgacacctttactactttcgatgcctcgggggagtgtgggagctgtgtcaatactcccagctgcccaaggtggagtaaaccaaagggtgtgaagcagaggtgtctctacaacctgcccttcaagaggaacctggaaggctgccgggagcggtgcagcctggtgatacagatccccaggtgctgcaagggctacttcgggcgagactgtcaggcctgccctggaggaccagatgccccgtgtaataaccggggtgtctgccttgatcagtactcggccaccggagagtgtaaatgcaacaccggcttcaatgggacggcgtgtgagatgtgctggccggggagattcgggcctgattgtctgccctgtggctgctcagaccacggacagtgcgatgatggcatcacgggctccgggcagtgcctctgtgaaacggggtggacaggcccctcgtgtgacactcaggcagttttgcctgcagtgtgtacgcctccttgttctgctcatgccacctgtaaggagaacaacacgtgtgagtgtaacctggattatgaaggtgacggaatcacatgcacagttgtggatttctgcaaacaggacaacgggggctgtgcaaaggtggccagatgctcccagaagggcacgaaggtctcctgcagctgccagaagggatacaaaggggacgggcacagctgcacagagatagacccctgtgcagacggccttaacggagggtgtcacgagcacgccacctgtaagatgacaggcccgggcaagcacaagtgtgagtgtaaaagtcactatgtcggagatgggctgaactgtgagccggagcagctgcccattgaccgctgcttacaggacaatgggcagtgccatgcagacgccaaatgtgtcgacctccacttccaggataccactgttggggtgttccatctacgctccccactgggccagtataagctgacctttgacaaagccagagaggcctgtgccaacgaagctgcgaccatggcaacctacaaccagctctcctatgcccagaaggccaagtaccacctgtgctcagcaggctggctggagaccgggcgggttgcctaccccacagccttcgcctcccagaactgtggctctagtgtggttgggatagtggactatggacctagacccaacaagagtgaaatgtgggatgtcttctgctatcggccg

SEQ ID NO: 244 - protein, 552 aa, Homo sapiens
RILQNLTTLATNNGYIKFSNLIQDSGLLSVITDPIHTPVTLFWPTDQALHALPAEQQDFLFNQDNKDKLKEYLKFHVIRDAKVLAVDLPTSTAWKTLQGSELSVKCGAGRDIGDLFLNGQTCRIVQRELLFDLGVAYGIDCLLIDPTLGGRCDTFTTFDASGECGSCVNTPSCPRWSKPKGVKQRCLYNLPFKRNLEGCRERCSLVIQIPRCCKGYFGRDCQACPGGPDAPCNNRGVCLDQYSATGECKCNTGFNGTACEMCWPGRFGPDCLPCGCSDHGQCDDGITGSGQCLCETGWTGPSCDTQAVLPAVCTPPCSAHATCKENNTCECNLDYEGDGITCTVVDFCKQDNGGCAKVARCSQKGTKVSCSCQKGYKGDGHSCTEIDPCADGLNGGCHEHATCKMTGPGKHKCECKSHYVGDGLNCEPEQLPIDRCLQDNGQCHADAKCVDLHFQDTTVGVFHLRSPLGQYKLTFDKAREACANEAATMATYNQLSYAQKAKYHLCSAGWLETGRVAYPTAFASQNCGSSVVGIVDYGPRPNKSEMWDVFCY

SEQ ID NO: 245 - DNA, 1668 bp, Homo sapiens
  CDS (7)..(1662)
ggatccagaattctgcaaaatcttacgactttggcaacaaacaatggctacatcaaatttagcaacttaatacaggactcaggtttgctgagtgtcatcaccgatcccatccacaccccagtcactctcttctggcccaccgaccaagccctccatgccctacctgctgaacaacaggacttcctgttcaaccaagacaacaaggacaagctgaaggagtatttgaagtttcatgtgatacgagatgccaaggttttagctgtggatcttcccacatccactgcctggaagaccctgcaaggttcagagctgagtgtgaaatgtggagctggcagggacatcggtgacctctttctgaatggccaaacctgcagaattgtgcagcgggagctcttgtttgacctgggtgtggcctgcggcattgactgtctgctgattgatcccaccctggggggccgctgtgacacctttactactttcgatgcctcgggggagtgtgggagctgtgtcaatactcccagctgcccaaggtggagtaaaccaaagggtgtgaagcagaagtgtctctacaacctgcccttcaagaggaacctggaaggctgccgggagcggtgcagcctggtgatacagatccccaggtgctgcaagggctacttcgggcgagactgtcaggcctgccctggaggaccagatgccccgtgtaataaccggggtgtctgccttgatcagtactcggccaccggagagtgtaaatgcaacaccggcttcaatgggacggcgtgtgagatgtgctggccggggagatttgggcctgattgtctgccctgtggctgctcagaccacggacagtgcgatgatggcatcacgggctccgggcagtgcctctgtgaaacggggtggacaggcccctcgtgtgacactcaggcagttttgcctgcagtgtgtacgcctccttgttctgctcatgccacctgtaaggagaacaacacgtgtgagtgtaacctggattatgaaggtgacggaatcacatgcacagttgtggatttctgcaaacaggacaacgggggctgtgcaaaggtggccagatgctcccagaagggcacgaaggtctcctgcagctgccagaagggatacaaaggggacgggcacagctgcacagagatagacccctgtgcagacggccttaacggagggtgtcacgagcacgccacctgtaagatgacaggcccgggcaagcacaagtgtgagtgtaaaagtcactatgtcggagatgggctgaactgtgagccggagcagctgcccattgaccgctgcttacaggacaatgggcagtgccatgcagacgccaaatgtgtcgacctccacttccaggataccactgttggggtgttccatctacgctccccactgggccagtataagctgacctttgacaaagccagagaggcctgtgccaacgaagctgcgaccatggcaacctacaaccagctctcctatgcccagaaggccaagtaccacctgtgctcagcaggctggctggagaccgggcgggttgcctaccccacagccttcgcctcccagaactgcggctctggtgtggttgggatagtggactatggacctagacccaacaagagtgaaatgtgggatgtcttctgctatcggccg

SEQ ID NO: 246 - protein, 552 aa, Homo sapiens
RILQNLTTLATNNGYIKFSNLIQDSGLLSVITDPIHTPVTLFWPTDQALHALPAEQQDFLFNQDNKDKLKEYLKFHVIRDAKVLAVDLPTSTAWKTLQGSELSVKCGAGRDIGDLFLNGQTCRIVQRELLFDLGVACGIDCLLIDPTLGGRCDTFTTFDASGECGSCVNTPSCPRWSKPKGVKQKCLYNLPFKRNLEGCRERCSLVIQIPRCCKGYFGRDCQACPGGPDAPCNNRGVCLDQYSATGECKCNTGFNGTACEMCWPGRFGPDCLPCGCSDHGQCDDGITGSGQCLCETGWTGPSCDTQAVLPAVCTPPCSAHATCKENNTCECNLDYEGDGITCTVVDFCKQDNGGCAKVARCSQKGTKVSCSCQKGYKGDGHSCTEIDPCADGLNGGCHEHATCKMTGPGKHKCECKSHYVGDGLNCEPEQLPIDRCLQDNGQCHADAKCVDLHFQDTTVGVFHLRSPLGQYKLTFDKAREACANEAATMATYNQLSYAQKAKYHLCSAGWLETGRVAYPTAFASQNCGSGVVGIVDYGPRPNKSEMWDVFCY

SEQ ID NO: 247 - DNA, 1668 bp, Homo sapiens
  CDS (7)..(1662)
ggatccagaattctgcaaaatcttacgactttggcaacaaacaatggctacatcaaatttagcaacttaatacaggactcaggtttgctgagtgtcgtcaccgatcccatccacaccccagtcactctcttctggcccaccgaccaagccctccatgccctacctgctgaacaacaggacttcctgttcaaccaagacaacaaggacaagctgaaggagtatttgaagtttcatgtgatacgagatgccaaggttttagctgtggatcttcccacatccactgcctggaagaccctgcaaggttcagagctgagtgtgaaatgtggagctggcagggacatcggtgacctctttctgaatggccaaacctgcagaattgtgcagcgggagctcttgtttgacctgggtgtggcctacggcattgactgtctgctgattgatcccaccctggggggccgctgtgacacctttactactttcgatgcctcgggggagtgtgggagctgtgtcaatactcccagctgcccaaggtggagtaaaccaaagggtgtgaagcagaagtgtctctacaacctgcccttcaagaggaacctggaaggctgccgggagcggtgcagcctggtgatacagatccccaggtgctgcaagggctacttcgggcgagactgtcaggcctgccctggaggaccagatgccccgtgtaataaccggggtgtctgccttgatcagtactcggccaccggagagtgtaaatgcaacaccggcttcaatgggacggcgtgtgagatgtgctggccggggagattcgggcctgattgtctgccctgtggctgctcagaccacggacagtgcgatgatggcatcacgggctccgggcagtgcctctgtgaaacggggtggacaggcccctcgtgtgacactcaggcagttttgcctgcagtgtgtacgcctccttgttctgctcatgccacctgtaaggagaacaacacgtgtgagtgtaacctggattatgaaggtgacggaatcacatgcacagttgtggatttctgcaaacaggacaacgggggctgtgcaaaggtggccagatgctcccagaagggcacgaaggtctcctgcagctgccagaagggatacaaaggggacgggcacagctgcacagagatagacccctgtgcagacggccttaacggagggtgtcacgagcacgccacctgtaagatgacaggcccgggcaagcacaagtgtgagtgtaaaagtcactatgtcggagatgggctgaactgtgagccggagcagctgcccattgaccgctgcttacaggacaatgggcagtgccatgcagacgccaaatgtgtcgacctccacttccaggataccactgttggggtgttccatctacgctccccactgggccagtataagctgacctttgacaaagccagagaggcctgtgccaacgaagctgcgaccacggcaacctacaaccagctctcctatgcccagaaggccaagtaccacctgtgctcagcaggctggctggagaccgggcgggttgcctaccccacagccttcgcctcccagaactgtggctctggtgtggttgggatagtggactatggacctagacccaacaagagtgaaatgtgggatgtcttctgctatcggccg

SEQ ID NO: 248 - protein, 552 aa, Homo sapiens
RILQNLTTLATNNGYIKFSNLIQDSGLLSVVTDPIHTPVTLFWPTDQALHALPAEQQDFLFNQDNKDKLKEYLKFHVIRDAKVLAVDLPTSTAWKTLQGSELSVKCGAGRDIGDLFLNGQTCRIVQRELLFDLGVAYGIDCLLIDPTLGGRCDTFTTFDASGECGSCVNTPSCPRWSKPKGVKQKCLYNLPFKRNLEGCRERCSLVIQIPRCCKGYFGRDCQACPGGPDAPCNNRGVCLDQYSATGECKCNTGFNGTACEMCWPGRFGPDCLPCGCSDHGQCDDGITGSGQCLCETGWTGPSCDTQAVLPAVCTPPCSAHATCKENNTCECNLDYEGDGITCTVVDFCKQDNGGCAKVARCSQKGTKVSCSCQKGYKGDGHSCTEIDPCADGLNGGCHEHATCKMTGPGKHKCECKSHYVGDGLNCEPEQLPIDRCLQDNGQCHADAKCVDLHFQDTTVGVFHLRSPLGQYKLTFDKAREACANEAATTATYNQLSYAQKAKYHLCSAGWLETGRVAYPTAFASQNCGSGVVGIVDYGPRPNKSEMWDVFCY

SEQ ID NO: 249 - DNA, 1668 bp, Homo sapiens
  CDS (7)..(1662)
ggatccagaattctgcaaaatcttacgactttggcaacaaacaatggctacatcaaatttagcaacttaatacaggactcaggtttgctgagtgtcatcaccgatcccatccacaccccagtcactctcttctggcccaccgaccaagccctccatgccctacctgctgaacaacaggacttcctgttcaaccaagacaacaaggacaagctgaaggagtatttgaagtttcatgtgatacgagatgccaaggttttagctgtggatcttcccacatccactgcctggaagacccttcaaggttcagagctgagtgtgaaatgtggagctggcagggacatcggtgacctctttctgaatggccaaacctgcagaattgtgcagcgggagctcttgtttgacctgggtgtggcctacggcattgactgtctgctgattgatcccaccctggggggccgctgtgacacctttactactttcgatgcctcgggggagtgtgggagctgtgtcaatactcccagctgcccaaggtggagtaaaccaaagggtgtgaagcagaagtgtctctacaacctgcccttcaagaggaacctggaaggctgccgggagcggtgcagcctggtgatacagatccccaggtgctgcaagggctacttcgggcgagactgtcaggcctgccctggaggaccagatgccccgtgtaataaccggggtgtctgccttgatcagtactcggccaccggagagtgtaaatgcaacaccggcttcaatgggacggcgtgtgagatgtgctggccggggagattcgggcctgattgtctgccctgtggctgctcagaccacggacagtgcgatgatggcatcacgggctccgggcagtgcctctgtgaaacggggtggacaggcccctcgtgtgacactcaggcagttttgcctgcagtgtgtacgcctccttgttctgctcatgccacctgtaaggagaacaacacgtgtgagtgtaacctggattatgaaggtgacggaatcacatgcacagttgtggatttctgcaaacaggacaacgggggctgtgcaaaggtggccagatgctcccagaagggcacgaaggtctcctgcagctgccagaagggatacaaaggggacgggcacagctgcacagagatagacccctgtgcagacggccttaacggagggtgtcacgagcacgccacctgtaagatgacaggcccgggcaagcacaagtgtgagtgtaaaagtcactatgtcggagatgggctgaactgtgagccggagcagctgcccattgaccgctgcttacaggacaatgggcagtgccatgcagacgccaaatgtgtcgacctccacttccaggataccactgttggggtgttccatctacgctccccactgggccagtataagctgacctttgacaaagccagagaggcctgtgccaacgaagctgcgaccatggcaacctacaaccagctctcctatgcccagaaggccaagtaccacctgtgctcagcaggctggctggagaccgggcgggttgcctaccccacagccttcgcctcccagaactgtggctctggtgtggttgggatagtggactatggacctagacccaacaagagtgaaatgtgggatgtcttctgctatcggccg

SEQ ID NO: 250 - protein, 552 aa, Homo sapiens; identical to SEQ ID NO: 238

SEQ ID NO: 251 - DNA, 4527 bp, Homo sapiens
  CDS (4)..(4509)
gacatggaccaggatgagaaaagcttctggttgtcacagagcaatattccagccctaataaagtaccatatgctactaggcacatacagagtggcagatctgcagaccctgtcttcttctgacatgttggcaacatctttgcagggcaacttccttcacttggcaaaggtggatgggaatatcacaattgaaggggcctccattgtcgatggggacaacgcagccacaaatggagtgatacacatcatcaacaaggtgctggtcccacaaagacgtctaactggctccttaccaaacctgctcatgcggctggaacagatgcctgactattccatcttccggggctacatcattcaatataatctggcgaatgcaattgaggctgccgatgcctacacagtgtttgctccaaacaacaatgccatcgagaattacatcagggagaagaaagtcttgtctctagaggaggacgtcctccggtatcatgtggtcctggaggagaaactcctgaagaatgacctgcacaatggcatgcatcgtgagaccatgctgggtttctcctatttccttagcttctttctccacaatgaccagctctatgtaaatgaggctccaataaactacaccaatgtagccactgataagggagtgatccatggcttgggaaaagttctggaaattcagaagaacagatgtgataataatgacactactattatacgaggaagatgtaggacatgctcctcagagctgacctgcccattcggaactaaatctctaggtaatgagaagaggagatgcatctatacctcctatttcatgggaagacgaaccctgtttattgggtgccagccaaaatgtgtgagaaccgtcattacgagagaatgctgtgccggcttctttggcccccaatgccagccctgcccagggaatgcccagaatgtctgctttggtaatggcatctgtttggatggagtgaatggcacaggtgtgtgtgagtgtggggagggcttcagcggcacagcctgcgagacctgcaccgagggcaagtacggcatccactgtgaccaagcatgttcttgtgtccatgggagatgcaaccaaggacccttgggagatggctcctgtgactgtgatgttggctggcgaggagtgcattgtgacaatgcaaccacagaagacaactgcaatgggacatgccataccagcgccaactgcctcaccaactcagatggtacagcttcatgcaagtgtgcagcaggattccaaggaaacgggaccatctgcacagcaatcaatgcctgtgagatcagcaatggaggttgctctgccaaggctgactgtaagagaaccaccccaggaaggcgagtgtgcacgtgcaaagcaggctacacgggtgatggcattgtgtgcctggaaatcaacccgtgtttggagaaccatggtggctgtgacaagaatgcggagtgcacacagacaggacccaaccaggctgcctgtaactgtttgccagcatacactggagatggaaaggtctgcacactcatcaatgtctgcttaactaaaaatggcggctgtggtgaatttgccatctgcaaccacactgggcaagtagaaaggacttgtacttgcaagccaaactacattggagatggatttacctgccgcggcagcatttatcaggagcttcccaagaacccgaaaacttcccagtatttcttccagttgcaggagcatttcgtgaaagatctggtcggcccaggccccttcactgtttttgcacctttatctgcagcctttgatgaggaagctcgggttaaagactgggacaaatacggtttaatgccccaggttcttcggtaccatgtggtcgcctgccaccagctgcttctggaaaacctgaaattgatctcaaatgctacttccctccaaggagagccaatagtcatctccgtctctcagagcacggtgtatataaacaataaggctaagatcatatccagtgatatcatcagtactaatgggattgttcatatcatagacaaattgctatctcccaaaaatttgcttatcactcccaaagacaactctggaagaattctgcaaaatcttacgactttggcaacaaacaatggctacatcaaatttagcaacttaatacaggactcaggtttgctgagtgtcatcaccgatcccatccacaccccagtcactctcttctggcccaccgaccaagccctccatgccctacctgctgaacaacaggacttcctgttcaaccaagacaacaaggacaagctgaaggagtatttgaagtttcatgtgatacgagatgccaaggttttagctgtggatcttcccacatccactgcctggaagaccctgcaaggttcagagctgagtgtgaaatgtggagctggcagggacatcggtgacctctttctgaatggccaaacctgcagaattgtgcagcgggagctcttgtttgacctgggtgtggcctacggcattgactgtctgctgattgatcccaccctggggggccgctgtgacacctttactactttcgatgcctcgggggagtgtgggagctgtgtcaatactcccagctgcccaaggtggagtaaaccaaagggtgtgaagcagaagtgtctctacaacctgcccttcaagaggaacctggaaggctgccgggagcggtgcagcctggtgatacagatccccaggtgctgcaagggctacttcgggcgagactgtcagcctcgcaactctaaaagtgtctgccttgatcagtactcggccaccggagagtgtaaatgcaacaccggcttcaatgggacggcgtgtgagatgtgctggccggggagatttgggcctgattgtctgccctgtggctgctcagaccacggacagtgcgatgatggcatcacgggctccgggcagtgcctctgtgaaacggggtggacaggcccctcgtgtgacactcaggcagttttgcctgcagtgtgtacgcctccttgttctgctcatgccacctgtaaggagaacaacacgtgtgagtgtaacctggattatgaaggtgacggaatcacatgcacagttgtggatttctgcaaacaggacaacgggggctgtgcaaaggtggccagatgctcccagaagggcacgaaggtctcctgcagctgccagaagggatacaaaggggacgggcacagctgcacagagatagacccctgtgcagacggccttaacggagggtgtcacgagcacgccacctgtaagatgacaggcccgggcaagcacaagtgtgagtgtaaaagtcactatgtcggagatgggctgaactgtgagccggagcagctgcccattgaccgctgcttacaggacaatgggcagtgccatgcagacgccaaatgtgtcgacctccacttccaggataccactgttggggtgttccatctacgctccccactgggccagtataagctgacctttgacaaagccagagaggcctgtgccaacgaagctgcgaccatggcaacctacaaccagctctcctatgcccagaaggccaagtaccacctgtgctcagcaggctggctggagaccgggcgggttgcctaccccacagccttcgcctcccagaactgtggctctggtgtggttgggatagtggactatggacctagacccaacaagagtgaaatgtgggatgtcttctgctatcggatgaaagatgtgaactgcacctgcaaggtgggctatgtgggagatggcttctcatgcagtgggaacctgctgcaggtcctgatgtccttcccctcactcacaaacttcctgacggaagtgctggcctattccaacagctcagctcgaggccgtgcatttctagaacacctgactgacctgtccatccgcggcaccctctttgtgccacagaacagtgggctgggggagaatgagaccttgtctgggcgggacatcgagcaccacctcgccaatgtcagcatgtttttctacaatgaccttgtcaatggcaccaccctgcaaacgagggtgggaagcaagctgctcatcactgccagccaggacccactccaaccgacggagaccaggtttgttgatggaagagccattctgcagtgggacatctttgcctccaatgggatcattcatgtcatttccaggcctttaaaagcaccccctgcccccgtgaccttgacccacactggcttgggagcagggatcttctttgccatcatcctggtgactggggctgttgccttggctgcttactcctactttcggataaaccggagaacaatcggcttccagcattttgagtcggaagaggacattaatgttgcagctcttggcaagcagcagcctgagaatatctcgaaccccttgtatgagagcacaacctcagctcccccagaaccttcctacgaccccttcacggactctgaagaacggcagcttgagggcaatgaccccttgaggacactgtgagggcctggacgggag

SEQ ID NO: 252 - protein, 1502 aa, Homo sapiens
MDQDEKSFWLSQSNIPALIKYHMLLGTYRVADLQTLSSSDMLATSLQGNFLHLAKVDGNITIEGASIVDGDNAATNGVIHIINKVLVPQRRLTGSLPNLLMRLEQMPDYSIFRGYIIQYNLANAIEAADAYTVFAPNNNAIENYIREKKVLSLEEDVLRYHVVLEEKLLKNDLHNGMHRETMLGFSYFLSFFLHNDQLYVNEAPINYTNVATDKGVIHGLGKVLEIQKNRCDNNDTTIIRGRCRTCSSELTCPFGTKSLGNEKRRCIYTSYFMGRRTLFIGCQPKCVRTVITRECCAGFFGPQCQPCPGNAQNVCFGNGICLDGVNGTGVCECGEGFSGTACETCTEGKYGIHCDQACSCVHGRCNQGPLGDGSCDCDVGWRGVHCDNATTEDNCNGTCHTSANCLTNSDGTASCKCAAGFQGNGTICTAINACEISNGGCSAKADCKRTTPGRRVCTCKAGYTGDGIVCLEINPCLENHGGCDKNAECTQTGPNQAACNCLPAYTGDGKVCTLINVCLTKNGGCGEFAICNHTGQVERTCTCKPNYIGDGFTCRGSIYQELPKNPKTSQYFFQLQEHFVKDLVGPGPFTVFAPLSAAFDEEARVKDWDKYGLMPQVLRYHVVACHQLLLENLKLISNATSLQGEPIVISVSQSTVYINNKAKIISSDIISTNGIVHIIDKLLSPKNLLITPKDNSGRILQNLTTLATNNGYIKFSNLIQDSGLLSVITDPIHTPVTLFWPTDQALHALPAEQQDFLFNQDNKDKLKEYLKFHVIRDAKVLAVDLPTSTAWKTLQGSELSVKCGAGRDIGDLFLNGQTCRIVQRELLFDLGVAYGIDCLLIDPTLGGRCDTFTTFDASGECGSCVNTPSCPRWSKPKGVKQKCLYNLPFKRNLEGCRERCSLVIQIPRCCKGYFGRDCQPRNSKSVCLDQYSATGECKCNTGFNGTACEMCWPGRFGPDCLPCGCSDHGQCDDGITGSGQCLCETGWTGPSCDTQAVLPAVCTPPCSAHATCKENNTCECNLDYEGDGITCTVVDFCKQDNGGCAKVARCSQKGTKVSCSCQKGYKGDGHSCTEIDPCADGLNGGCHEHATCKMTGPGKHKCECKSHYVGDGLNCEPEQLPIDRCLQDNGQCHADAKCVDLHFQDTTVGVFHLRSPLGQYKLTFDKAREACANEAATMATYNQLSYAQKAKYHLCSAGWLETGRVAYPTAFASQNCGSGVVGIVDYGPRPNKSEMWDVFCYRMKDVNCTCKVGYVGDGFSCSGNLLQVLMSFPSLTNFLTEVLAYSNSSARGRAFLEHLTDLSIRGTLFVPQNSGLGENETLSGRDIEHHLANVSMFFYNDLVNGTTLQTRVGSKLLITASQDPLQPTETRFVDGRAILQWDIFASNGIIHVISRPLKAPPAPVTLTHTGLGAGIFFAIILVTGAVALAAYSYFRINRRTIGFQHFESEEDINVAALGKQQPENISNPLYESTTSAPPEPSYDPFTDSEERQLEGNDPLRTL

SEQ ID NO: 253 - DNA, 5416 bp, Homo sapiens
  CDS (478)..(5007)
gtagaatgcatcaaaactggcacgggcacccacacctgcgtgtgtcagcagggttggacagggaatgggagagactgctcggagatcaacaactgcctgctgcccagtgcaggcggctgccacgacaacgcatcctgtttgtatgtgggtcccgggcagaatgagtgtgagtgcaagaaaggatttcgaggaaatgggattgactgtgcaccaataacttcatgcttggaacaaaccgggaaatgtcatccattggcaagctgtcaatctacttcgtctggtgtctggagctgtgtttgtcaagagggctatgaaggagatggctttctgtgctatggaaacgcagcagtggaattgtcatttctctccgaagcagctatatttaaccgatggataaataatgcttctctacaacccacactgtcagccacctcaaacctcactgtcctcgtgccttcccaacaagctactgaggacatggaccaggatgagaaaagcttctggttgtcacagagcaatattccagccctaataaagtaccatatgctactaggcacatacagagtggcagatctgcagaccctgtcttcttctgacatgttggcaacatctttgcagggcaacttccttcacttggcaaaggtggatgggaatatcacaattgaaggggcctccattgtcgatggggacaacgcagccacaaatggagtgatacacatcatcaacaaggtgctggtcccacaaagacgtctaactggctccttaccaaacctgctcatgcggctggaacagatgcctgactattccatcttccggggctacatcattcaatataatctggcgaatgcaattgaggctgccgatgcctacacagtgtttgctccaaacaacaatgccatcgagaattacatcagggagaagaaagtcttgtctctagaggaggacgtcctccggtatcatgtggtcctggaggagaaactcctgaagaatgacctgcacaatggcatgcatcgtgagaccatgctgggtttctcctatttccttagcttctttctccacaatgaccagctctatgtaaatgaggctccaataaactacaccaatgtagccactgataagggagtgatccatggcttgggaaaagttctggaaattcagaagaacagatgtgataataatgacactactattatacgaggaagatgtaggacatgctcctcagagctgacctgcccattcggaactaaatctctaggtaatgagaagaggagatgcatctatacctcctatttcatgggaagacgaaccctgtttattgggtgccagccaaaatgtgtgagaaccgtcattacgagagaatgctgtgccggcttctttggcccccaatgccagccctgcccagggaatgcccagaatgtctgctttggtaatggcatctgtttggatggagtgaatggcacaggtgtgtgtgagtgtggggagggcttcagcggcacagcctgcgagacctgcaccgagggcaagtacggcatccactgtgaccaagcatgttcttgtgtccatgggagatgcaaccaaggacccttgggagatggctcctgtgactgtgatgttggctggcgaggagtgcattgtgacaatgcaaccacagaagacaactgcaatgggacatgccataccagcgccaactgcctcaccaactcagatggtacagcttcatgcaagtgtgcagcaggattccaaggaaacgggaccatctgcacagcaatcaatgcctgtgagatcagcaatggaggttgctctgccaaggctgactgtaagagaaccaccccaggaaggcgagtgtgcacgtgcaaagcaggctacacgggtgatggcattgtgtgcctggaaatcaacccgtgtttggagaaccatggtggctgtgacaagaatgcggagtgcacacagacaggacccaaccaggctgcctgtaactgtttgccagcatacactggagatggaaaggtctgcacactcatcaatgtctgcttaactaaaaatggcggctgtagtgaatttgccatctgcaaccacactgggcaagtagaaaggacttgtacttgcaagccaaactacattggagatggatttacctgccgcggcagcatttatcaggagcttcccaagaacccgaaaacttcccagtatttcttccagttgcaggagcacttcgtgaaagatctggtcggcccaggccccttcactgtttttgcacctttatctgcagcctttgatgaggaagctcgggttaaagactgggacaaatacggtttaatgccccaggttcttcggtaccatgtggtcgcctgccaccagctgcttctggaaaacctgaaattgatctcaaatgctacttccctccaaggagagccaatagtcatctccgtctctcagagcacggtgtatataaacaataaggctaagatcatatccagtgatatcatcagtactaatgggattgttcatatcatagacaaattgctatctcccaaaaatttgcttatcactcccaaagacaactctggaagaattctgcaaaatcttacgactttggcaacaaacaatggctacatcaaatttagcaacttaatacaggactcaggtttgctgagtgtcatcaccgatcccatccacaccccagtcactctcttctggcccaccgaccaagccctccatgccctacctgctgaacaacaggacttcctgttcaaccaagacaacaaggacaagctgaaggagtatttgaagtttcatgtgatacgagatgccaaggttttagctgtggatcttcccacatccactgcctggaagaccctgcaaggttcagagctgagtgtgaaatgtggagctggcagggacatcggtgacctctttctgaatggccaaacctgcagaattgtgcagcgggagctcttgtttgacctgggtgtggcctacggcattgactgtctgctgattgatcccaccctggggggccgctgtgacacctttactactttcgatgcctcgggggagtgtgggagctgtgtcaatactcccagctgcccaaggtggagtaaaccaaagggtgtgaagcagaagtgtctctacaacctgcccttcaagaggaacctggaaggctgccgggagcggtgcagcctggtgatacagatccccaggtgctgcaagggctacttcgggcgagactgtcaggcctgccctggaggaccagatgccccgtgtaataaccggggtgtctgccttgatcagtactcggccaccggagagtgtaaatgcaacaccggcttcaatgggacggcgtgtgagatgtgctggccggggagatttgggcctgattgtctgccctgtggctgctcagaccacggacagtgcgatgatggcatcacgggctccgggcagtgcctctgtgaaacggggtggacaggcccctcgtgtgacactcaggcagttttgcctgcagtgtgtacgcctccttgttctgctcatgccacctgtaaggagaacaacacgtgtgagtgtaacctggattatgaaggtgacggaatcacatgcacagttgtggatttctgcaaacaggacaacgggggctgtgcaaaggtggccagatgctcccagaagggcacgaaggtctcctgcagctgccagaagggatacaaaggggacgggcacagctgcacagagatagacccctgtgcagacggccttaacggagggtgtcacgagcacgccacctgtaagatgacaggcccgggcaagcacaagtgtgagtgtaaaagtcactatgtcggagatgggctgaactgtgagccggagcagctgcccattgaccgctgcttacaggacaatgggcagtgccatgcagacgccaaatgtgtcgacctccacttccaggataccactgttggggtgttccatctacgctccccactgggccagtataagctgacctttgacaaagccagagaggcctgtgccaacgaagctgcgaccatggcaacctacaaccagctctcctatgcccagaaggccaagtaccacctgtgctcagcaggctggctggagaccgggcgggttgcctaccccacagccttcgcctcccagaactgtggctctggtgtggttgggatagtggactatggacctagacccaacaagagtgaaatgtgggatgtcttctgctatcggatgaaagatgtgaactgcacctgcaaggtgggctatgtgggagatggcttctcatgcagtgggaacctgctgcaggtcctgatgtccttcccctcactcacaaacttcctgacggaagtgctggcctattccaacagctcagctcgaggccgtgcatttctagaacacctgactgacctgtccatccgcggcaccctctttgtgccacagaacagtgggctgggggagaatgagaccttgtctgggcgggacatcgagcaccacctcgccaatgtcagcatgtttttctacaatgaccttgtcaatggcaccaccctgcaaacgaggctgggaagcaagctgctcatcactgccagccaggacccactccaaccgacggagaccaggtttgttgatggaagagccattctgcagtgggacatctttgcctccaatgggatcattcatgtcatttccaggcctttaaaagcaccccctgcccccgtgaccttgacccacactggcttgggagcagggatcttctttgccatcatcctggtgactggggctgttgccttggctgcttactcctactttcggataaaccggagaacaatcggcttccagcattttgagtcggaagaggacattaatgttgcagctcttggcaagcagcagcctgagaatatctcgaaccccttgtatgagagcacaacctcagctcccccagaaccttcctacgaccccttcacggactctgaagaacggcagcttgagggcaatgaccccttgaggacactgtgagggcctggacgggagatgccagccatcactcactgccacctgggccatcaactgtgaattctcagcaccagttgccttttaggaacgtaaagtcctttaagcactcagaagccatacctcatctctctggctgatctgggggttgtttctgtgggtgagagatgtgttgctgtgcccacccagtacagcttcctcctctgaccctttggctcttcttcctttgtactcttcagctggcacctgctccattctgccctacatgatgggtaactgtgatctttcttccctgtttgttagattgtaagcctccgtctttgtatcccagcccctagcccagtgcctgacacaggaactgtgcacaataaaggtttatggaacagaaacaaagtcaacagaaaaaaaaaaa

SEQ ID NO: 254 - protein, 1510 aa, Homo sapiens [sequence omitted]

SEQ ID NO: 255 - DNA, 7670 bp, Homo sapiens
  CDS (8)..(7660)
tttcctcatgatgctacaacatttagtaattttttgtcttggattggttgtacaaaatttctgctccccagctgaaaccacagggcaggcaagaagatgtgataggaagtctcttcttacaattaggaccgagtgccgatcctgcgctctcaaccttggagtcaagtgcccggatggttacaccatgattaccagtggctctgtaggggttcgagattgcaggtacacctttgaggtcagaacatactctctgtctctccccggatgccgccatatttgtaggaaggactatctccaacctcggtgttgtcctggccgctggggcccagactgtatagagtgcccaggtggagcggggtcaccctgcaatggcagaggcagttgtgctgaaggcatggaaggaaatggaacctgctcctgccaagaagggtttggtggaacagcctgtgaaacctgtgctgacgacaacttatttggacccagctgttcatcagtgtgcaactgtgtgcatggggtgtgcaacagtggactagatggcgatggaacctgtgagtgctactctgcgtacactggccccaagtgtgacaagcccatccctgaatgtgcagccttgctctgcccagaaaattccagatgttcgccttccactgaagatgaaaacaaactggaatgcaaatgccttcccaattaccgaggcgatggcaaatactgcgaccccatcaatccatgtttacgaaaaatctgccaccctcatgctcattgtacgtacctgggaccaaatcggcacagttgtacatgccaagaaggctaccgtggggatggccaagtgtgcttgcctgtggacccctgccaaattaactttggaaactgccctacaaagtctacagtgtgcaaatatgatgggcctggacagtctcactgcgagtgtaaggagcattaccagaatttcgtacctggagtggggtgcagtatgactgatatatgtaaatcagataacccgtgtcataggaatgcaaattgcaccaccgtcgcaccaggccgaactgaatgcatttgccagaaaggttacgtgggtgatggcttaacgtgttatggaaacattatggagcgactcagagaattaaatactgaacccagaggaaaatggcaaggaaggctgacctctttcatctcactcctagacaaagcttatgcctggccactgagtaagctgggacccttcacggtgctgttacctacagacaagggactgaaaggattcaatgtaaatgagcttttggtggataataaagctgctcaatactttgtgaaactccacataattgctggtcagatgaacatcgaatatatgaataacacagacatgttctacaccttgactggaaagtcgggggaaatcttcaacagcgataaggacaatcaaataaagcttaaactccatggaggcaaaaagaaggtaaaaattatacaaggggacatcattgcttccaatgggcttctgcacatccttgacagagccatggacaagttagaacacacatttgagagcaacaatgagcaaaccataatgacaatgctacaaccaaggtacagcaagttcagatctttgttagaggaaaccaatttgggacatgccttagatgaggatggagttggtggaccatacaccatttttgttccaaataatgaagcattgaataacatgaaggacggcactctcgattacctcctttctccagagggatctcggaagcttctggaactcgtcagataccacattgtcccatttacccagcttgaagtggccactctcatctccacccctcacatcaggagcatggccaaccagctcatacagttcaacaccaccgacaatggacagattctggcaaatgatgtggcaatggaagaaattgagatcactgccaaaaatggccgaatttacacactgacaggagttctcattcctccctccattgtcccgattctgccccatcgatgtgatgaaacaaagagagagatgaaactgggcacttgtgtgagctgttctctggtgtactggagcagatgtcctgctaactctgagcccacagcactcttcacacacagatgtgtctacagtggcaggtttgggagcctgaagagcggctgtgcccggtactgcaatgccactgtgaagattccaaagtgctgcaaaggcttctatggacctgactgcaaccagtgtccaggaggcttctcaaatccatgctcaggaaatggacagtgtgcagatagcctcggcggcaacgggacatgcatttgtgaggagggcttccaaggctcccagtgtcagttctgctctgatcccaataaatacggacctcggtgtaacaaaaaatgcctgtgcgttcacggaacatgcaataacaggatagacagcgatggggcctgcctcactggcacatgcagagacggctctgccgggagactctgtgataagcagacctcagcctgtgggccctatgtgcagttctgtcacatccacgccacctgtgaatacagcaatgggacagccagttgtatttgcaaagcaggatatgaaggagatggaactctgtgttctgagatggacccttgcacaggactaactccaggaggctgtagccgcaatgcagaatgcatcaaaactggcacgggcacccacacctgcgtgtgtcagcagggttggacagggaatgggagagactgctcggagatcaacaactgcctgctgcccagtgcaggcggctgccacgacaacgcatcctgtttgtatgtgggtcccgggcagaatgagtgtgagtgcaagaaaggatttcgaggaaatgggattgactgtgaaccaataacttcatgcttggaacaaaccgggaaatgtcatccattggcaagctgtcaatctacttcgtctggtgtctggagctgtgtttgtcaagagggctatgaaggagatggctttctgtgctatggaaacgcagcagtggaattgtcatttctctccgaagcagctatatttaaccgatggataaataatgcttctctacaacccacactgtcagccacctcaaacctcactgtcctcgtgccttcccaacaagctactgaggacatggaccaggatgagaaaagcttctggttgtcacagagcaatattccagccctaataaagtaccatatgctactaggcacatacagagtggcagatctgcagaccctgtcttcttctgacatgttggcaacatctttgcagggcaacttccttcacttggcaaaggtggatgggaatatcacaattgaaggggcctccattgtcgatggggacaatgcagccacaaatggagtgatacacatcatcaacaaggtgctggtcccacaaagacgtctaactggctccttaccaaacctgctcatgcggctggaacagatgcctgactatcccatcttccggggctacatcattcaatataatctggcgaatgcaattgaggctgccgatgcctacacagtgtttgctccaaacaacaatgccatcgagaattacatcagggagaagaaagtcttgtctctagaggaggacgtcctccggtatcatgtggtcctggaggagaaactcctgaagaatgacctgcacaatggcatgcatcgtgagaccatgctgggtttctcctatttccttagcttctttctccataatgaccagctctatgtaaatgaggctccaataaactacaccaatgtagccactgataagggagtgatccatggcttgggaaaagttctggaaattcagaagaacagatgtgataataatgccactactattatacgaggaagatgtaggacatgctcctcagagctgacctgcccattcggaactaaatctctaggtaatgagaagaggagatgcatctatacctcctatttcatgggaagacgaaccctgtttattgggtgccagccaaaatgtgtgagaaccgtcattacgagagaatgctgtgccggcttctttggcccccaatgccagccctgtccagggaatgcccagaatgtctgctttggtaatggcatctgtttggatggagtgaatggcacaggtgtgtgtgagtgtggggagggcttcagcggcacagcctgcgagacctgcaccgagggcaagtacggcatccactgtgaccaagcatgttcttgtgtccatgggagatgcaaccaaggacccttgggagatggctcctgtgactgtgatgttggctggcgaggagtgcattgtgacaatgcaaccacagaagacaactgcaatgggacatgccataccagcgccaactgcctcaccaactcagatggtacagcttcatgcaagtgtgcagcaggattccaaggaaacgggaccatctgcacagcaatcaatgcctgtgagatcagcaatggaggttgctctgccaaggctgactgtaagagaaccaccccaggaaggcgagtgtgcacgtgcaaagcaggctacacgggtgatggcattgtgtgcctggaaatcaacccgtgtttggagaaccatggtggctgtgacaagaatgcggagtgcacacagacaggacccaaccaggctgcctgtaactgtttgccagcatacactggagatggaaaggtctgcacactcatcaatgtctgcttaactaaaaatggcggctgtagtgaatttgccatctgcaaccacactgggcaagtagaaaggacttgtacttgcaagccaaactacattggagatggatttacctgccgcggcagcatttatcaggagcttcccaagaacccgaaaacttcccagtatttcttccagttgcaggagcatttcgtgaaagatctggtcggcccaggccccttcactgtttttgcacctttatctgcagcctttgatgaggaagctcgggttaaagactgggacaaatacggtttaatgccccaggttcttcggtaccatgtggtcgcctgccaccagctgcttctggaaaacctgaaattgatctcaaatgctacttccctccaaggagagccaatagtcatctccgtctctcagagcacggtgtatataaataataaggctaagatcatatccagtgatatcatcagtactaatgggattgttcatatcatagacaaattgctatctcccaaaaatttgcttatcactcccaaagacaactctggaagaattctgcaaaatcttacgactttggcaacaaacaatggctacatcaaatttagcaacttaatacaggactcaggtttgctgagtgtcatcaccgatcccatccacaccccagtcactctcttctggcccaccgaccaagccctccatgccctacctgctgaacaacaggacttcctgttcaaccaagacaacaaggacaagctgaaggagtatttgaagtttcatgtgatacgagatgccaaggttttagctgtggatcttcccacatccactgcctggaagaccctgcaaggttcagagctgagtgtgaaatgtggagctggcagggacatcggtgacctctttctgaatggccaaacctgcagaattgtgcagcgggagctcttgtttgacctgggtgtggcctacggcattgactgtctgctgattgatcccaccctggggggccgctgtgacacctttactactttcgatgcctcgggggagtgtgggagctgtgtcaatactcccagctgcccaaggtggagtaaaccaaagggtgtgaagcagaagtgtctctacaacctgcccttcaagaggaacctggaaggctgccgggagcggtgcagcctggtgatacagatccccaggtgctgcaagggctacttcgggcgagactgtcaggcctgccctggaggaccagatgccccgtgtaataaccggggtgtctgccttgatcagtactcggccaccggagagtgtaaatgcaacaccggcttcaatgggacggcgtgtgagatgtgctggccggggagatttgggcctgattgtctgccctgtggctgctcagaccacggacagtgcgatgatggcatcacgggctccgggcagtgcctctgtgaaacggggtggacaggcccctcgtgtgacactcaggcagttttgcctgcagtgtgtacgcctccttgttctgctcatgccacctgtaaggagaacaacacgtgtgagtgtaacctggattatgaaggtgacggaatcacatgcacagttgtggatttctgcaaacaggacaacgggggctgtgcaaaggtggccagatgctcccagaagggcacgaaggtctcctgcagctgccagaagggatacaaaggggacgggcacagctgcacagagatagacccctgtgcagacggccttaacggagggtgtcacgagcacgccacctgtaagatgacaggcccgggcaagcacaagtgtgagtgtaaaagtcactatgtcggagatgggctgaactgtgagccggagcagctgcccattgaccgctgcttacaggacaatgggcagtgccatgcagacgccaaatgtgtcgacctccacttccaggataccactgttggggtgttccatctacgctccccactgggccagtataagctgacctttgacaaagccagagaggcctgtgccaacgaagctgcgaccatggcaacctacaaccagctctcctatgcccagaaggccaagtaccacctgtgctcagcaggctggctggagaccgggcgggttgcctaccccacagccttcgcctcccagaactgtggctctggtgtggttgggatagtggactatggacctagacccaacaagagtgaaatgtgggatgtcttctgctatcggatgaaagatgtgaactgcacctgcaaggtgggctatgtgggagatggcttctcatgcagtgggaacctgctgcaggtcctgatgtccttcccctcactcacaaacttcctgacggaagtgctggcctattccaacagctcagctcgaggccgtgcatttctagaacacctgactgacctgtccatccgcggcaccctctttgtgccacagaacagtgggctgggggagaatgagaccttgtctgggcgggacatcgagcaccacctcgccaatgtcagcatgtttttctacaatgaccttgtcaatggcaccaccctgcaaacgaggctgggaagcaagctgctcatcactgccagccaggacccactccaaccgacggagaccaggtttgttgatggaagagccattctgcagtgggacatctttgcctccaatgggatcattcatgtcatttccaggcctttaaaagcaccccctgcccccgtgaccttgacccacactggcttgggagcagggatcttctttgccatcatcctggtgactggggctgttgccttggctgcttactcctactttcggataaaccggagaacaatcggcttccagcattttgagtcggaagaggacattaatgttgcagctcttggcaagcagcagcctgagaatatctcgaaccccttgtatgagagcacaacctcagctcccccagaaccttcctacgaccccttcacggactctgaagaacggcagcttgagggcaatgaccccttgaggacactgtgagggcctg

SEQ ID NO: 256 - protein, 2551 aa, Homo sapiens
MMLQHLVIFCLGLVVQNFCSPAETTGQARRCDRKSLLTIRTECRSCALNLGVKCPDGYTMITSGSVGVRDCRYTFEVRTYSLSLPGCRHICRKDYLQPRCCPGRWGPDCIECPGGAGSPCNGRGSCAEGMEGNGTCSCQEGFGGTACETCADDNLFGPSCSSVCNCVHGVCNSGLDGDGTCECYSAYTGPKCDKPIPECAALLCPENSRCSPSTEDENKLECKCLPNYRGDGKYCDPINPCLRKICHPHAHCTYLGPNRHSCTCQEGYRGDGQVCLPVDPCQINFGNCPTKSTVCKYDGPGQSHCECKEHYQNFVPGVGCSMTDICKSDNPCHRNANCTTVAPGRTECICQKGYVGDGLTCYGNIMERLRELNTEPRGKWQGRLTSFISLLDKAYAWPLSKLGPFTVLLPTDKGLKGFNVNELLVDNKAAQYFVKLHIIAGQMNIEYMNNTDMFYTLTGKSGEIFNSDKDNQIKLKLHGGKKKVKIIQGDIIASNGLLHILDRAMDKLEHTFESNNEQTIMTMLQPRYSKFRSLLEETNLGHALDEDGVGGPYTIFVPNNEALNNMKDGTLDYLLSPEGSRKLLELVRYHIVPFTQLEVATLISTPHIRSMANQLIQFNTTDNGQILANDVAMEEIEITAKNGRIYTLTGVLIPPSIVPILPHRCDETKREMKLGTCVSCSLVYWSRCPANSEPTALFTHRCVYSGRFGSLKSGCARYCNATVKIPKCCKGFYGPDCNQCPGGFSNPCSGNGQCADSLGGNGTCICEEGFQGSQCQFCSDPNKYGPRCNKKCLCVHGTCNNRIDSDGACLTGTCRDGSAGRLCDKQTSACGPYVQFCHIHATCEYSNGTASCICKAGYEGDGTLCSEMDPCTGLTPGGCSRNAECIKTGTGTHTCVCQQGWTGNGRDCSEINNCLLPSAGGCHDNASCLYVGPGQNECECKKGFRGNGIDCEPITSCLEQTGKCHPLASCQSTSSGVWSCVCQEGYEGDGFLCYGNAAVELSFLSEAAIFNRWINNASLQPTLSATSNLTVLVPSQQATEDMDQDEKSFWLSQSNIPALIKYHMLLGTYRVADLQTLSSSDMLATSLQGNFLHLAKVDGNITIEGASIVDGDNAATNGVIHIINKVLVPQRRLTGSLPNLLMRLEQMPDYPIFRGYIIQYNLANAIEAADAYTVFAPNNNAIENYIREKKVLSLEEDVLRYHVVLEEKLLKNDLHNGMHRETMLGFSYFLSFFLHNDQLYVNEAPINYTNVATDKGVIHGLGKVLEIQKNRCDNNATTIIRGRCRTCSSELTCPFGTKSLGNEKRRCIYTSYFMGRRTLFIGCQPKCVRTVITRECCAGFFGPQCQPCPGNAQNVCFGNGICLDGVNGTGVCECGEGFSGTACETCTEGKYGIHCDQACSCVHGRCNQGPLGDGSCDCDVGWRGVHCDNATTEDNCNGTCHTSANCLTNSDGTASCKCAAGFQGNGTICTAINACEISNGGCSAKADCKRTTPGRRVCTCKAGYTGDGIVCLEINPCLENHGGCDKNAECTQTGPNQAACNCLPAYTGDGKVCTLINVCLTKNGGCSEFAICNHTGQVERTCTCKPNYIGDGFTCRGSIYQELPKNPKTSQYFFQLQEHFVKDLVGPGPFTVFAPLSAAFDEEARVKDWDKYGLMPQVLRYHVVACHQLLLENLKLISNATSLQGEPIVISVSQSTVYINNKAKIISSDIISTNGIVHIIDKLLSPKNLLITPKDNSGRILQNLTTLATNNGYIKFSNLIQDSGLLSVITDPIHTPVTLFWPTDQALHALPAEQQDFLFNQDNKDKLKEYLKFHVIRDAKVLAVDLPTSTAWKTLQGSELSVKCGAGRDIGDLFLNGQTCRIVQRELLFDLGVAYGIDCLLIDPTLGGRCDTFTTFDASGECGSCVNTPSCPRWSKPKGVKQKCLYNLPFKRNLEGCRERCSLVIQIPRCCKGYFGRDCQACPGGPDAPCNNRGVCLDQYSATGECKCNTGFNGTACEMCWPGRFGPDCLPCGCSDHGQCDDGITGSGQCLCETGWTGPSCDTQAVLPAVCTPPCSAHATCKENNTCECNLDYEGDGITCTVVDFCKQDNGGCAKVARCSQKGTKVSCSCQKGYKGDGHSCTEIDPCADGLNGGCHEHATCKMTGPGKHKCECKSHYVGDGLNCEPEQLPIDRCLQDNGQCHADAKCVDLHFQDTTVGVFHLRSPLGQYKLTFDKAREACANEAATMATYNQLSYAQKAKYHLCSAGWLETGRVAYPTAFASQNCGSGVVGIVDYGPRPNKSEMWDVFCYRMKDVNCTCKVGYVGDGFSCSGNLLQVLMSFPSLTNFLTEVLAYSNSSARGRAFLEHLTDLSIRGTLFVPQNSGLGENETLSGRDIEHHLANVSMFFYNDLVNGTTLQTRLGSKLLITASQDPLQPTETRFVDGRAILQWDIFASNGIIHVISRPLKAPPAPVTLTHTGLGAGIFFAIILVTGAVALAAYSYFRINRRTIGFQHFESEEDINVAALGKQQPENISNPLYESTTSAPPEPSYDPFTDSEERQLEGNDPLRTL

SEQ ID NO: 257 - DNA, 7892 bp, Homo sapiens
  CDS (1)..(4626)
atgcggggggcgcccgcgcgcctgctgctgccgctgctgccgtggctcctgctgctcctggcgcccgaggctcggggcgcgcccggctgcccgctatccatccgcagctgcaagtgctcgggggagcggcccaaggggctgagcggcggcgtccctggcccggctcggcggagggtggtgtgcagcggcggggacctcccggagcctcccgagcccggccttctgcctaacggcaccgttacccttggcaaccgtttctccactgccccttgcccgcagtcggggctggcccagtcttttcgattgtgtccagaacaatacagtaacgcctctggttgggtgagttcagaggctgcccgcttcctgacaggacacaactggtcagcctctgacgctggccgcccggcctgcattttccccggcccggtctcctggagacaggtaccagcttacaacgccggacaggatcagggtagcaaatatagcttctatggaggaaaggtcaaagatgagtatctgcgtaggtccccgatctgtcgctctgctgccgccctgcacactgacaccagtgcccgcagctggtctgaatttaggctcttgagcaataacaagatcacggggctccgcaatggctccttcctgggactgtcactgctggagaagcttctcatgagagcacatttttctgatgaagatgaaaagacggcctgtccttctccagcaccaaggctctggaggctgcatagcaagtgcaccctgagcatggcaggcaatcagaagaaccagggcggcagcagctcacaagaggcagcatctggcttgatgccgagtcggcggctccagcggggagaggttgagggcctctgcacttgcctctgcacggacctgaggaacaacatcatcagcacagtgcagccgggcgccttcctgggcctgggggagctgaagcgtttagatctctccaacaaccggattggctgtctcacctccgagaccttccagggcctccccaggcttctccgactaaacatatctggaaacatcttctccagtctgcaacctggggtctttgatgagctgccagcccttaaggttgtggacttgggcaccgagttcctgacctgtgactgccacctgcgctggctgctgccctgggcccagaatcgctccctgcagctgtcggaacacacgctctgtgcttaccccagtgccctgcatgctcatgccctgggcagcctccaggaggcccagctctgctgcgagggggccctggagctgcacacacaccacctcatcccgtccctacgccaagtggtgttccagggggatcggctgcccttccagtgctctgccagctacctgggcaacgacacccgcatccgctggtaccacaaccgagcccctgtggagggtgatgagcaggcgggcatcctcctggccgagagcctcatccacgactgcaccttcatcaccagtgagctgacgctgtctcacatcggcgtgtgggcctcaggcgagtgggagtgcaccgtgtccatggcccaaggcaacgccagcaagaaggtggagatcgtggtgctggagacctctgcctcctactgccccgccgagcgtgttgccaacaaccgcggggacttcaggtggccccgaactctggctggcatcacagcctaccagtcctgcctgcagtatcccttcacctcagtgcccctgggcgggggtgccccgggcacccgagcctcccgccggtgtgaccgtgccggccgctgggagccaggggactactcccactgtctctacaccaacgacatcaccagggtgctgtacaccttcgtgctgatgcccatcaatgcctccaatgcgctgaccctggctcaccagctgcgcgtgtacacagccgaggccgctagcttttcagacatgatggatgtagtctatgtggctcagatgatccagaaatttttgggttatgtcgaccagatcaaagagctggtagaggtgatggtggacatgcccagcaacttgatgctggtggacgagcacctgctgtggctggcccagcgcgaggacaaggcctgcagccgcatcgtgggtgccatagagcgcattgggggggccgccctcagcccccatgcccagcacatctcagtgaatgcgaggaacgtggcattggaggcctacctcatcaagccgcacagctacgtgggcctgacctgcacagccttccagaggagggagggaggggtgccgggcacacggccaggaagccctggccagaaccccccacctgagcccgagcccccagctgaccagcagctccgcttccgctgcaccaccgggaggcccaatgtttctctgtcgtccttccacatcaagaacagcgtggccctggcctccatccagctgcccccgagtctattctcatcccttccggctgccctggctcccccggtgcccccagactgcaccctgcaactgctcgtcttccgaaatggccgcctcttccacagccacagcaacacctcccgccctggagctgctgggcctggcaagaggcgtggcgtggccacccccgtcatcttcgcaggaaccagtggctgtggcgtgggaaacctgacagagccagtggccgtttcgctgcggcactgggctgagggagccgaacctgtggccgcttggtggagccaggaggggcccggggaggctgggggctggacctcggagggctgccagctccgctccagccagcccaatgtcagcgccctgcactgccagcacttgggcaatgtggccgtgctcatggagctgagcgcctttcccagggaggtggggggcgccggggcagggctgcaccccgtggtatacccctgcacggccttgctgctgctctgcctcttcgccaccatcatcacctacatcctcaaccacagctccatccgtgtgtcccggaaaggctggcacatgctgctgaacttgtgcttccacatagccatgacctctgctgtctttgcggggggcatcacactcaccaactaccagatggtctgccaggcggtgggcatcaccctgcactactcctccctatccacgctgctctggatgggcgtgaaggcgcgagtgctccataaggagctcacctggagggcaccccctccgcaagaaggggaccccgctctgcctactcccagtcctatgctccggtacatactttcaattccagctttgcaattggggagggactccaacgcaggcgtaggaaacctcccaaggttctatttgatcgctggagggattccactcattatctgtggcatcacagctgcagtcaacatccacaactaccgggaccacagcccctactgctggctggtgtggcgtccaagccttggcgccttctacatccctgtggctttgattctgctcatcacctggatctatttcctgtgcgccgggctacgcttacggggtcctctggcacagaaccccaaggcgggcaacagcagggcctccctggaggcaggggaggagctgaggggttccaccaggctcaggggcagcggccccctcctgagtgactcaggttcccttcttgctactgggagcgcgcgagtggggacgcccgggcccccggaggatggtgacagcctctattctccgggagtccagctaggggcgctggtgaccacgcacttcctgtacttggccatgtgggcctgcggggctctggcagtgtcccagcgctggctgccccgggtggtgtgcagctgcttgtacggggtggcagcctccgccctgggcctcttcgtcttcactcaccactgtgccaggcggagggacgtgagagcctcgtggcgcgcctgctgcccccctgcctctcccgcggccccccatgccccgccccgggccctgcccgccgccgcagaggacggttccccggtgttcggggaggggcccccctccctcaagtcctccccaagcggcagcagcggccatccgctggctctgggcccctgcaagctcaccaacctgcagctggcccagagtcaggtgtgcgaggcgggggcggcggccggcggggaaggagagccggagccggcgggcacccggggaaacctcgcccaccgccaccccaacaacgtgcaccacgggcgtcgggcgcacaagagccgggccaagggacaccgcgcgggggaggcctgcggcaagaaccggctcaaggccctgcgcgggggcgcggcgggggcgctggaactgctgtccagcgagagcggtagtctgcacaacagccccaccgacagctacctgggcagcagccgcaacagcccgggcgccggcctgcagctggaaggcgagcccatgctcacgccgtccgagggcagcgacaccagcgccgcgccgctttctgaggcgggccgggcaggccagcgccgcagcgccagccgcgacagtctcaagggcggcggcgcgctggagaaggagagccatcgccgctcgtacccgctcaacgccgccagcctaaacggcgcccccaaggggggcaagtacgacgacgtcaccctgatgggcgcggaggtagccagcggcggctgcatgaagaccggactctggaagagcgaaactaccgtctaaggtggggcgggcgacgcggtagacgggttggccacgcggctcgttcccccgctcctcggggccctccaaggtgtctccgtagtcagcaggttggaggcagaggagccgatggctggaggaagcccacaggcggatgttccccacttgcctagagggcatccctctggggtagcgacagacaatcccagaaacacgcataatacatttccgtccagcccggggcagtctgactgtcggtgccctcccaggaacggggaaggcctccgtctgtgtgaaagggcacagcacatcccaggtgcaccctccccaagtactcccaccccgcctactgtccatgcggcctcactgggggccatcagcctcaccagcaaagcagagatgagagcgtgggaactgtgttctttcctccctgccctctactgatttcagcccagcccctgcctagatcctaggtcccttttcctcccgagtttggctggcacgagagctagcccagcacatgaagcaggtgatgttaagtcacaaggtgctgcttttcagatccactatgcaagaggggagggtggggccacgtgaaaggcagctctagacatcaaccagtcctgggggaggggagtgggaaccgggcacaactaggaacaatgccaccattcccacaggagtggtacttaaaccagacagcagggttcagaggtggcacaccgggacaaagctgaggccctgcacctcaacagctgactgccaggtgcctgtgggtgaactgaggggagtagagggagagggcaggtggaactggggcagaatctagtcatgccctaaagctagtcctgtaaacaatggtgccccagaaagctgcaggtggtgtttggagaagcagttacttttcagttacaagacccatctccctagtctcagccttacaacaccacgggactaaggaagagcacttccttgcctccgtaaggccagaggaagaaccatcccaatcatttgatctccagctccacagtagagagaaacctacaaaatgtcaaaccagcttcccgactcccaggagctcaagccaagcccagaggcagtggctggggtccctgcaggtcatgaggggcctatgcctttactccttttaaacaccagcacccgtcttttccccaacctaaaaccaaccaccagcatttcactacaggaccaaatggaaaccgagggaaccctgggtcttgggaagaacaacaggaaaccaaggtctgacctagggttccctcccagtcttcacatcactctggcctcatcaccaaggtgacagaggacacaggggagggggaaaacccacacacactccttggaatgggtcctgttatttatgcttgctgcacagacatattagaagaaaaaaaaaaagctttgtattattcttccacatatgctggctgctgtttacacaccctgccaatgccttagcactggagagctttttgcaatatgctggggaaaggggagggagggaatgaaagtgccaaagaaaacatgtttttaagaactcgggttttatacaatagaatgttttctagcagatgcctcttgttttaatatattaaaattttgcaaagccctttgagctactgccttagtctacccactgtccttttgttatgaggtagaggatctcatgacaccatacacacaaacccatcattgcctgtgaatgcacgtagggccagaattccccagttcccgctcctctgagggttgatactgctgggaatgccaaccactccacaagcagagggaagccccctcaggcctgcaggaggagccgcagcagtgtgtccaattcaaaccagcagcaaagagcctgacattttcccatccatctatgaggaaagccatctcacagaacatggacataggcaacttgctctcccacaccaagggatgggaatctctcctacctatagtcatccctgcactcctgactttactccaggacccagggtccaactaatggcagagcccctcttggttccttcaaacaagaaaagcaatacctacggactggtgtacacttccatccttggttataacaggaatgttatcaagctgtcagaacaggatgaagtgctcccagtggatatccatcagggagggttagggacactcgtggcagcctgtctagcagcctgggctctctgaaagtccctaacttcctgaggggtacgcaaatactgttctatttcactatcagaaatgttctcatctccagtgacagtggagacagggggtacagggcagatccgcttcggggacttcaacatgcagggtggcaagagaagggcaggactggccggccgcttcccctggggtaaacctaaggaattatttcccacctccccttctccttgcccctgtccccaccccggtggctccttctctcgggtctccacttctgctgtcccatcccgaaaggcagagcggaccagtgactggcggtgctggagaaggtcaccgatgtgcttcaccacagaccgtttgtcaagtctcagaactcgtaaccaggccagctgctcagccatccgcagcagcacagccagcagctcctgcaggcgggaggacgccgggtagggcaggtccacatttgccaatttacaaaatcgggcaagggaacatgaaagccgatctgcaggctgcagcgactgccaagccaggaaagtcgcagcagtgatgacgggcaagggatgcctcccggtcaccagccacgtctcatttgccagctccaccaactgcattgttcgagacagcatcttctctttgtcttccacgtatttggctggcacagaaggtgaagcttggaacagtttgaagctgaaataaccaaaatgagggttggatcttaatgatataggggctgctctcccacagtgaggaaagacagcccactcaagatggggaagctattctgccctcaggaatactcaagctcactgggcagcaagttaataaaggtagtgagagaaaacagggcgtcttccgcttgttaggggaaggtggagggatggaggagagcacgaacatttattgggcgcctcccaatcaccattattctgagtgctttacaacgttctcatttaatctacgtgcacgtgcaccatcttatgtgcatgtatagttaaaaaactttcccatagtcatccagccaggcagtaaccaagcttcaaatacaaggctatttgacaccaacagcctctactttcaacgttatttatcag

SEQ ID NO: 258 - protein, 1542 aa, Homo sapiens
MRGAPARLLLPLLPWLLLLLAPEARGAPGCPLSIRSCKCSGERPKGLSGGVPGPARRRVVCSGGDLPEPPEPGLLPNGTVTLGNRFSTAPCPQSGLAQSFRLCPEQYSNASGWVSSEAARFLTGHNWSASDAGRPACIFPGPVSWRQVPAYNAGQDQGSKYSFYGGKVKDEYLRRSPICRSAAALHTDTSARSWSEFRLLSNNKITGLRNGSFLGLSLLEKLLMRAHFSDEDEKTACPSPAPRLWRLHSKCTLSMAGNQKNQGGSSSQEAASGLMPSRRLQRGEVEGLCTCLCTDLRNNIISTVQPGAFLGLGELKRLDLSNNRIGCLTSETFQGLPRLLRLNISGNIFSSLQPGVFDELPALKVVDLGTEFLTCDCHLRWLLPWAQNRSLQLSEHTLCAYPSALHAHALGSLQEAQLCCEGALELHTHHLIPSLRQVVFQGDRLPFQCSASYLGNDTRIRWYHNRAPVEGDEQAGILLAESLIHDCTFITSELTLSHIGVWASGEWECTVSMAQGNASKKVEIVVLETSASYCPAERVANNRGDFRWPRTLAGITAYQSCLQYPFTSVPLGGGAPGTRASRRCDRAGRWEPGDYSHCLYTNDITRVLYTFVLMPINASNALTLAHQLRVYTAEAASFSDMMDVVYVAQMIQKFLGYVDQIKELVEVMVDMPSNLMLVDEHLLWLAQREDKACSRIVGAIERIGGAALSPHAQHISVNARNVALEAYLIKPHSYVGLTCTAFQRREGGVPGTRPGSPGQNPPPEPEPPADQQLRFRCTTGRPNVSLSSFHIKNSVALASIQLPPSLFSSLPAALAPPVPPDCTLQLLVFRNGRLFHSHSNTSRPGAAGPGKRRGVATPVIFAGTSGCGVGNLTEPVAVSLRHWAEGAEPVAAWWSQEGPGEAGGWTSEGCQLRSSQPNVSALHCQHLGNVAVLMELSAFPREVGGAGAGLHPVVYPCTALLLLCLFATIITYILNHSSIRVSRKGWHMLLNLCFHIAMTSAVFAGGITLTNYQMVCQAVGITLHYSSLSTLLWMGVKARVLHKELTWRAPPPQEGDPALPTPSPMLRYILSIPALQLGRDSNAGVGNLPRFYLIAGGIPLIICGITAAVNIHNYRDHSPYCWLVWRPSLGAFYIPVALILLITWIYFLCAGLRLRGPLAQNPKAGNSRASLEAGEELRGSTRLRGSGPLLSDSGSLLATGSARVGTPGPPEDGDSLYSPGVQLGALVTTHFLYLAMWACGALAVSQRWLPRVVCSCLYGVAASALGLFVFTHHCARRRDVRASWRACCPPASPAAPHAPPRALPAAAEDGSPVFGEGPPSLKSSPSGSSGHPLALGPCKLTNLQLAQSQVCEAGAAAGGEGEPEPAGTRGNLAHRHPNNVHHGRRAHKSRAKGHRAGEACGKNRLKALRGGAAGALELLSSESGSLHNSPTDSYLGSSRNSPGAGLQLEGEPMLTPSEGSDTSAAPLSEAGRAGQRRSASRDSLKGGGALEKESHRRSYPLNAASLNGAPKGGKYDDVTLMGAEVASGGCMKTGLWKSETTV

SEQ ID NO: 259 - DNA, 4103 bp, Homo sapiens
  CDS (1)..(3990)
atgcggggggcgcccgcgcgcctgctgctgccgctgctgccgtggctcctgctgctcctggcgcccgaggctcggggcgcgcccggctgcccgctatccatccgcagctgcaagtgctcgggggagcggcccaaggggctgagcggcggcgtccctggcccggctcggcggagggtggtgtgcagcggcggggacctcccggagcctcccgagcccggccttctgcctaacggcaccgttacccttgacctgaggaacaacatcatcagcacagtgcagccgggcgccttcctgggcctgggggagctgaagcgtttagatctctccaacaaccggattggctgtctcacctccgagaccttccagggcctccccaggcttctccgactaaacatatctggaaacatcttctccagtctgcaacctggggtctttgatgagctgccagcccttaaggttgtggacttgggcaccgagttcctgacctgtgactgccacctgcgctggctgctgccctgggcccagaatcgctccctgcagctgtcggaacacacgctctgtgcttaccccagtgccctgcatgctcatgccctgggcagcctccaggaggcccagctctgctgcgagggggccctggagctgcacacacaccacctcatcccgtccctacgccaagtggtgttccagggggatcggctgcccttccagtgctctgccagctacctgggcaacgacacccgcatccgctggtaccacaaccgagcccctgtggagggtgatgagcaggcgggcatcctcctggccgagagcctcatccacgactgcaccttcatcaccagtgagctgacgctgtctcacatcggcgtgtgggcctcaggcgagtgggagtgcaccgtgtccatggcccaaggcaacgccagcaagaaggtggagatcgtggtgctggagacctctgcctcctactgccccgccgagcgtgttgccaacaaccgcggggacttcaggtggccccgaactctggctggcatcacagcctaccagtcctgcctgcagtatcccttcacctcagtgcccctgggcgggggtgccccgggcacccgagcctcccgccggtgtgaccgtgccggccgctgggagtcaggggactactcccactgtctctacaccaacgacatcaccagggtgctgtacaccttcgtgctgatgcccatcaatgcctccaatgcgctgaccctggctcaccagctgcgcgtgtacacagccgaggccgctagcttttcagacatgatggatgtagtctatgtggctcagatgatccagaaatttttgggttatgtcgaccagatcaaagagctggtagaggtgatggtggacatggccagcaacttgatgctggtggacgagcacctgctgtggctggcccagcgcgaggacaaggcctgcagccgcatcgtgggtgccctggagcgcattgggggggccgccctcagcccccatgcccagcacatctcagtgaatgcgaggaacgtggcattggaggcctacctcatcaagccgcacagctacgtgggcctgacctgcacagccttccagaggagggagggaggggtgccgggcacacggccaggaagccctggccagaaccccccacctgagcccgagcccccagctgaccagcagctccgcttccgctgcaccaccgggaggcccaatgtttctctgtcgtccttccacatcaagaacagcgtggccctggcctccatccagctgcccccgagtctattctcatcccttccggctgccctggctcccccggtgcccccagactgcaccctgcaactgctcgtcttccgaaatggccgcctcttccacagccacagcaacacctcccgccctggagctgctgggcctggcaagaggcgtggcgtggccacccccgtcatcttcgcaggaaccagtggctgtggcgtgggaaacctgacagagccagtggccgtttcgctgcggcactgggctgagggagccgaacctgtggccgcttggtggagccaggaggggcccggggaggctgggggctggacctcggagggctgccagctccgctccagccagcccaatgtcagcgccctgcactgccagcacttgggcaatgtggccgtgctcatggagctgagcgcctttcccagggaggtggggggcgccggggcagggctgcaccccgtggtatacccctgcacggccttgctgctgctctgcctcttcgccaccatcatcacctacatcctcaaccacagctccatccgtgtgtcccggaaaggctggcacatgctgctgaacttgtgcttccacatagccatgacctctgctgtctttgcggggggcatcacactcaccaactaccagatggtctgccaggcggtgggcatcaccctgcactactcctccctatccacgctgctctggatgggcgtgaaggcgcgagtgctccataaggagctcacctggagggcaccccctccgcaagaaggggaccccgctctgcctactcccagtcctatgctccggtacatactttcaattccagctttgcaattggggagggactccaacgcaggcgtaggaaacctcccaaggttctatttgatcgctggagggattccactcattatctgtggcatcacagctgcagtcaacattcacaactaccgggaccacagcccctactgctggctggtgtggcgtccaagccttggcgccttctacatccctgtggctttgattctgctcatcacctggatctatttcctgtgcgccgggctacgcttacggggtcctctggcacagaaccccaaggcgggcaacagcagggcctccctggaggcaggggaggagctgaggggttccaccaggctcaggggcagcggccccctcctgagtgactcaggttcccttcttgctactgggagcgcgcgagtggggacgcccgggcccccggaggatggtgacagcctctattctccgggagtccagctaggggcgctggtgaccacgcacttcctgtacttggccatgtgggcctgcggggctctggcagtgtcccagcgctggctgccccgggtggtgtgcagctgcttgtacggggtggcagcctccgccctgggcctcttcgtcttcactcaccactgtgccaggcggagggacgtgagagcctcgtggcgcgcctgctgcccccctgcctctcccgcggccccccatgccccgccccgggccctgcccgccgccgcagaggacggttccccggtgttcggggaggggcccccctccctcaagtcctccccaagcggcagcagcggccatccgctggctctgggcccctgcaagctcaccaacctgcagctggcccagagtcaggtgtgcgaggcgggggcggcggccggcggggaaggagagccggagccggcgggcacccggggaaacctcgcccaccgccaccccaacaacgtgcaccacgggcgtcgggcgcacaagagccgggccaagggacaccgcgcgggggaggcctgcggcaagaaccggctcaaggccctgcgcgggggcgcggcgggggcgctggaactgctgtccagcgagagcggtagtctgcacaacagccccaccgacagctacctgggcagcagccgcaacagcccgggcgccggcctgcagctggaaggcgagcccatgctcacgccgtccgagggcagcgacaccagcgccgcgccgctttctgaggcgggccgggcaggccagcgccgcagcgccagccgcgacagtctcaagggcggcggcgcgctggagaaggagagccatcgccgctcgtacccgctcaacgccgccagcctaaacggcgcccccaaggggggcaagtacgacgacgtcaccctgatgggcgcggaggtagccagcggcggctgcatgaagaccggactctggaagagcgaaactaccgtctaaggtggggcgggcgacgcggtagacgggttggccacgcggctcgttcccccgctcctcggggccctccaaggtgtctccgtagtcagcaggttggaggcagaggagccgat

SEQ ID NO: 260 - protein, 1330 aa, Homo sapiens
MRGAPARLLLPLLPWLLLLLAPEARGAPGCPLSIRSCKCSGERPKGLSGGVPGPARRRVVCSGGDLPEPPEPGLLPNGTVTLDLRNNIISTVQPGAFLGLGELKRLDLSNNRIGCLTSETFQGLPRLLRLNISGNIFSSLQPGVFDELPALKVVDLGTEFLTCDCHLRWLLPWAQNRSLQLSEHTLCAYPSALHAHALGSLQEAQLCCEGALELHTHHLIPSLRQVVFQGDRLPFQCSASYLGNDTRIRWYHNRAPVEGDEQAGILLAESLIHDCTFITSELTLSHIGVWASGEWECTVSMAQGNASKKVEIVVLETSASYCPAERVANNRGDFRWPRTLAGITAYQSCLQYPFTSVPLGGGAPGTRASRRCDRAGRWESGDYSHCLYTNDITRVLYTFVLMPINASNALTLAHQLRVYTAEAASFSDMMDVVYVAQMIQKFLGYVDQIKELVEVMVDMASNLMLVDEHLLWLAQREDKACSRIVGALERIGGAALSPHAQHISVNARNVALEAYLIKPHSYVGLTCTAFQRREGGVPGTRPGSPGQNPPPEPEPPADQQLRFRCTTGRPNVSLSSFHIKNSVALASIQLPPSLFSSLPAALAPPVPPDCTLQLLVFRNGRLFHSHSNTSRPGAAGPGKRRGVATPVIFAGTSGCGVGNLTEPVAVSLRHWAEGAEPVAAWWSQEGPGEAGGWTSEGCQLRSSQPNVSALHCQHLGNVAVLMELSAFPREVGGAGAGLHPVVYPCTALLLLCLFATIITYILNHSSIRVSRKGWHMLLNLCFHIAMTSAVFAGGITLTNYQMVCQAVGITLHYSSLSTLLWMGVKARVLHKELTWRAPPPQEGDPALPTPSPMLRYILSIPALQLGRDSNAGVGNLPRFYLIAGGIPLIICGITAAVNIHNYRDHSPYCWLVWRPSLGAFYIPVALILLITWIYFLCAGLRLRGPLAQNPKAGNSRASLEAGEELRGSTRLRGSGPLLSDSGSLLATGSARVGTPGPPEDGDSLYSPGVQLGALVTTHFLYLAMWACGALAVSQRWLPRVVCSCLYGVAASALGLFVFTHHCARRRDVRASWRACCPPASPAAPHAPPRALPAAAEDGSPVFGEGPPSLKSSPSGSSGHPLALGPCKLTNLQLAQSQVCEAGAAAGGEGEPEPAGTRGNLAHRHPNNVHHGRRAHKSRAKGHRAGEACGKNRLKALRGGAAGALELLSSESGSLHNSPTDSYLGSSRNSPGAGLQLEGEPMLTPSEGSDTSAAPLSEAGRAGQRRSASRDSLKGGGALEKESHRRSYPLNAASLNGAPKGGKYDDVTLMGAEVASGGCMKTGLWKSETTV

SEQ ID NO: 261 - DNA, 341 bp, Homo sapiens
  CDS (3)..(341)
caaccggatccgagctgaagcgtttagatctctccaacaaccggattggctgtctcacctccgagaccttccagggcctccccaggcttctccgactaaacatatctggaaacatcttctccagtctgcaacctggggtctttgatgagctgccagcccttaaggttgtggacttgggcaccgagttcctgacctgtgactgccacctgcgctggctgctgccctgggcccagaatcgctccctgcagctgtcggaacacacgctctgtgcttaccccagtgccctgcatgctcaggccctgggcagcctccaggaggcccagctctgctgcgagctcgag

SEQ ID NO: 262 - protein, 113 aa, Homo sapiens
TGSELKRLDLSNNRIGCLTSETFQGLPRLLRLNISGNIFSSLQPGVFDELPALKVVDLGTEFLTCDCHLRWLLPWAQNRSLQLSEHTLCAYPSALHAQALGSLQEAQLCCELE

SEQ ID NO: 263 - DNA, 2227 bp, Homo sapiens
  CDS (2)..(2227)
caccggatccgcgcccggctgcccgctatccatccgcagctgcaagtgctcgggggagcgggccaaggggctgagcggcggcgtccctggcccggctcggcggagggtggtgtgcagcggcggggacctcccggagcctcccgagcccggccttctgcctaacggcaccgttaccctgctcttgagcaataacaagatcacggggctccgcaatggctccttcctgggactgtcactgctggagaagctggacctgaggaacaacatcatcagcacagtgcagccgggcgccttcctgggcctgggggagctgaagcgtttagatctctccaacaaccggattggctgtctcacctccgagaccttccagggcctccccaggcttctccgactaaacatatctggaaacatcttctccagtctgcaacctggggtctttgatgagctgccagcccttaaggttgtggacttgggcaccgagttcctgacctgtgactgccacctgcgctggctgctgccctgggcccagaatcgctccctgcagctgtcggaacacacgctctgtgcttaccccagtgccctgcatgctcaggccctgggcagcctccaggaggcccagctctgctgcgagggggccctggagctgcacacacaccacctcatcccgtccctacgccaagtggtgttccagggggatcggctgcccttccagtgctctgccagctacctgggcaacgacacccgcatccgctggtaccacgaccgagcccctgtggagggtgatgagcaggcgggcatcctcctggccgagagcctcatccacgactgcaccttcatcaccagtgagctgacgctgtctcacatcggcgtgtgggcctcaggcgagtgggagtgcaccgtgtccatggcccaaggcaacgccagcaagaaggtggagatcgtggtgctggagacctctgcctcctactgccccgccgagcgtgttgccaacaaccgcggggacttcaggtggccccgaactctggctggcatcacagcctaccagtcctgcctgcagtatcccttcacctcagtgcccctgggcgggggtgccccgggcacccgagcctcccgccggtgtgaccgtgccggccgctgggagccaggggactactcccactgtctctacaccaacgacatcaccagggtgctgtacaccttcgtgctgatgcccatcaatgcctccaatgcgctgaccctggctcaccagctgcgcgtgtacacagccgaggccgctagcttttcagacatgatggatgtagtctatgtggctcagatgatccagaaatttttgggttatgtcgaccagatcaaagagctggtagaggtgatggtggacatggccagcaacctgatgctggtggacgagcacctgctgtggctggcccagcgcgaggacaaggcctgcagccgcatcgtgggtgccctggagcgcattgggggggccgccctcagcccccatgcccagcacatctcagtgaatgcgaggaacgtggcattggaggcctacctcatcaagccgcacagctacgtgggcctgacctgcacagccttccagaggagggagggaggggtgccgggcacacggccaggaagccctggccagaaccccccacctgagcccgagcccccagctgaccagcagctccgcttccgctgcaccaccgggaggcccaatgtttctctgtcgtccttccacatcaagaacagcgtggccctggcctccatccagctgcccccgagtctattctcatcccttccggctgccctggctcccccggtgcccccagactgcaccctgcaactgctcgtcttccgaaatggccgcctcttccacagccacagcaacacctcccgccctggagctgctgggcctggcaagaggcgtggcgtggccacccccgtcatcttcgcaggaaccagtggctgtggcgtgggaaacctgacagagccagtggccgtttcgctgcggcactgggctgagggagccgaacctgtggccgcttggtggagccaggaggggcccggggaggctgggggctggacctcggagggctgccagctccgctccagccagcccaatgtcagcgccctgcactgccagcacttgggcaatgtggccgtgctcatggagctgagcgcctttcccagggaggtggggggcgccggggcagggctgctcgagggc

SEQ ID NO: 264 - protein, 742 aa, Homo sapiens
TGSAPGCPLSIRSCKCSGERAKGLSGGVPGPARRRVVCSGGDLPEPPEPGLLPNGTVTLLLSNNKITGLRNGSFLGLSLLEKLDLRNNIISTVQPGAFLGLGELKRLDLSNNRIGCLTSETFQGLPRLLRLNISGNIFSSLQPGVFDELPALKVVDLGTEFLTCDCHLRWLLPWAQNRSLQLSEHTLCAYPSALHAQALGSLQEAQLCCEGALELHTHHLIPSLRQVVFQGDRLPFQCSASYLGNDTRIRWYHDRAPVEGDEQAGILLAESLIHDCTFITSELTLSHIGVWASGEWECTVSMAQGNASKKVEIVVLETSASYCPAERVANNRGDFRWPRTLAGITAYQSCLQYPFTSVPLGGGAPGTRASRRCDRAGRWEPGDYSHCLYTNDITRVLYTFVLMPINASNALTLAHQLRVYTAEAASFSDMMDVVYVAQMIQKFLGYVDQIKELVEVMVDMASNLMLVDEHLLWLAQREDKACSRIVGALERIGGAALSPHAQHISVNARNVALEAYLIKPHSYVGLTCTAFQRREGGVPGTRPGSPGQNPPPEPEPPADQQLRFRCTTGRPNVSLSSFHIKNSVALASIQLPPSLFSSLPAALAPPVPPDCTLQLLVFRNGRLFHSHSNTSRPGAAGPGKRRGVATPVIFAGTSGCGVGNLTEPVAVSLRHWAEGAEPVAAWWSQEGPGEAGGWTSEGCQLRSSQPNVSALHCQHLGNVAVLMELSAFPREVGGAGAGLLEG

SEQ ID NO: 265 - DNA, 7860 bp, Homo sapiens
  CDS (1)..(4626)
atgcggggggcgcccgcgcgcctgctgctgccgctgctgccgtggctcctgctgctcctggcgcccgaggctcggggcgcgcccggctgcccgctatccatccgcagctgcaagtgctcgggggagcggcccaaggggctgagcggcggcgtccctggcccggctcggcggagggtggtgtgcagcggcggggacctcccggagcctcccgagcccggccttctgcctaacggcaccgttacccttggcaaccgtttctccactgccccttgcccgcagtcggggctggcccagtcttttcgattgtgtccagaacaatacagtaacgcctctggttgggtgagttcagaggctgcccgcttcctgacaggacacaactggtcagcctctgacgctggccgcccggcctgcattttccccggcccggtctcctggagacaggtaccagcttacaacgccggacaggatcagggtagcaaatatagcttctatggaggaaaggtcaaagatgagtatctgcgtaggtccccgatctgtcgctctgctgccgccctgcacactgacaccagtgcccgcagctggtctgaatttaggctcttgagcaataacaagatcacggggctccgcaatggctccttcctgggactgtcactgctggagaagcttctcatgagagcacatttttctgatgaagatgaaaagacggcctgtccttctccagcaccaaggctctggaggctgcatagcaagtgcaccctgagcatggcaggcaatcagaagaaccagggcggcagcagctcacaagaggcagcatctggcttgatgccgagtcggcggctccagcggggagaggttgagggcctctgcacttgcctctgcacggacctgaggaacaacatcatcagcacagtgcagccgggcgccttcctgggcctgggggagctgaagcgtttagatctctccaacaaccggattggctgtctcacctccgagaccttccagggcctccccaggcttctccgactaaacatatctggaaacatcttctccagtctgcaacctggggtctttgatgagctgccagcccttaaggttgtggacttgggcaccgagttcctgacctgtgactgccacctgcgctggctgctgccctgggcccagaatcgctccctgcagctgtcggaacacacgctctgtgcttaccccagtgccctgcatgctcatgccctgggcagcctccaggaggcccagctctgctgcgagggggccctggagctgcacacacaccacctcatcccgtccctacgccaagtggtgttccagggggatcggctgcccttccagtgctctgccagctacctgggcaacgacacccgcatccgctggtaccacaaccgagcccctgtggagggtgatgagcaggcgggcatcctcctggccgagagcctcatccacgactgcaccttcatcaccagtgagctgacgctgtctcacatcggcgtgtgggcctcaggcgagtgggagtgcaccgtgtccatggcccaaggcaacgccagcaagaaggtggagatcgtggtgctggagacctctgcctcctactgccccgccgagcgtgttgccaacaaccgcggggacttcaggtggccccgaactctggctggcatcacagcctaccagtcctgcctgcagtatcccttcacctcagtgcccctgggcgggggtgccccgggcacccgagcctcccgccggtgtgaccgtgccggccgctgggagccaggggactactcccactgtctctacaccaacgacatcaccagggtgctgtacaccttcgtgctgatgcccatcaatgcctccaatgcgctgaccctggctcaccagctgcgcgtgtacacagccgaggccgctagcttttcagacatgatggatgtagtctatgtggctcagatgatccagaaatttttgggttatgtcgaccagatcaaagagctggtagaggtgatggtggacatgcccagcaacttgatgctggtggacgagcacctgctgtggctggcccagcgcgaggacaaggcctgcagccgcatcgtgggtgccatagagcgcattgggggggccgccctcagcccccatgcccagcacatctcagtgaatgcgaggaacgtggcattggaggcctacctcatcaagccgcacagctacgtgggcctgacctgcacagccttccagaggagggagggaggggtgccgggcacacggccaggaagccctggccagaaccccccacctgagcccgagcccccagctgaccagcagctccgcttccgctgcaccaccgggaggcccaatgtttctctgtcgtccttccacatcaagaacagcgtggccctggcctccatccagctgcccccgagtctattctcatcccttccggctgccctggctcccccggtgcccccagactgcaccctgcaactgctcgtcttccgaaatggccgcctcttccacagccacagcaacacctcccgccctggagctgctgggcctggcaagaggcgtggcgtggccacccccgtcatcttcgcaggaaccagtggctgtggcgtgggaaacctgacagagccagtggccgtttcgctgcggcactgggctgagggagccgaacctgtggccgcttggtggagccaggaggggcccggggaggctgggggctggacctcggagggctgccagctccgctccagccagcccaatgtcagcgccctgcactgccagcacttgggcaatgtggccgtgctcatggagctgagcgcctttcccagggaggtggggggcgccggggcagggctgcaccccgtggtatacccctgcacggccttgctgctgctctgcctcttcgccaccatcatcacctacatcctcaaccacagctccatccgtgtgtcccggaaaggctggcacatgctgctgaacttgtgcttccacatagccatgacctctgctgtctttgcggggggcatcacactcaccaactaccagatggtctgccaggcggtgggcatcaccctgcactactcctccctatccacgctgctctggatgggcgtgaaggcgcgagtgctccataaggagctcacctggagggcaccccctccgcaagaaggggaccccgctctgcctactcccagtcctatgctccggtacatactttcaattccagctttgcaattggggagggactccaacgcaggcgtaggaaacctcccaaggttctatttgatcgctggagggattccactcattatctgtggcatcacagctgcagtcaacatccacaactaccgggaccacagcccctactgctggctggtgtggcgtccaagccttggcgccttctacatccctgtggctttgattctgctcatcacctggatctatttcctgtgcgccgggctacgcttacggggtcctctggcacagaaccccaaggcgggcaacagcagggcctccctggaggcaggggaggagctgaggggttccaccaggctcaggggcagcggccccctcctgagtgactcaggttcccttcttgctactgggagcgcgcgagtggggacgcccgggcccccggaggatggtgacagcctctattctccgggagtccagctaggggcgctggtgaccacgcacttcctgtacttggccatgtgggcctgcggggctctggcagtgtcccagcgctggctgccccgggtggtgtgcagctgcttgtacggggtggcagcctccgccctgggcctcttcgtcttcactcaccactgtgccaggcggagggacgtgagagcctcgtggcgcgcctgctgcccccctgcctctcccgcggccccccatgccccgccccgggccctgcccgccgccgcagaggacggttccccggtgttcggggaggggcccccctccctcaagtcctccccaagcggcagcagcggccatccgctggctctgggcccctgcaagctcaccaacctgcagctggcccagagtcaggtgtgcgaggcgggggcggcggccggcggggaaggagagccggagccggcgggcacccggggaaacctcgcccaccgccaccccaacaacgtgcaccacgggcgtcgggcgcacaagagccgggccaagggacaccgcgcgggggaggcctgcggcaagaaccggctcaaggccctgcgcgggggcgcggcgggggcgctggaactgctgtccagcgagagcggtagtctgcacaacagccccaccgacagctacctgggcagcagccgcaacagcccgggcgccggcctgcagctggaaggcgagcccatgctcacgccgtccgagggcagcgacaccagcgccgcgccgctttctgaggcgggccgggcaggccagcgccgcagcgccagccgcgacagtctcaagggcggcggcgcgctggagaaggagagccatcgccgctcgtacccgctcaacgccgccagcctaaacggcgcccccaaggggggcaagtacgacgacgtcaccctgatgggcgcggaggtagccagcggcggctgcatgaagaccggactctggaagagcgaaactaccgtctaaggtggggcgggcgacgcggtagacgggttggccacgcggctcgttcccccgctcctcggggccctccaaggtgtctccgtagtcagcaggttggaggcagaggagccgatggctggaggaagcccacaggcggatgttccccacttgcctagagggcatccctctggggtagcgacagacaatcccagaaacacgcataatacatttccgtccagcccggggcagtctgactgtcggtgccctcccaggaacggggaaggcctccgtctgtgtgaaagggcacagcacatcccaggtgcaccctccccaagtactcccaccccgcctactgtccatgcggcctcactgggggccatcagcctcaccagcaaagcagagatgagagcgtgggaactgtgttctttcctccctgccctctactgatttcagcccagcccctgcctagatcctaggtcccttttcctcccgagtttggctggcacgagagctagcccagcacatgaagcaggtgatgttaagtcacaaggtgctgcttttcagatccactatgcaagaggggagggtggggccacgtgaaaggcagctctagacatcaaccagtcctgggggaggggagtgggaaccgggcacaactaggaacaatgccaccattcccacaggagtggtacttaaaccagacagcagggttcagaggtggcacaccgggacaaagctgaggccctgcacctcaacagctgactgccaggtgcctgtgggtgaactgaggggagtagagggagagggcaggtggaactggggcagaatctagtcatgccctaaagctagtcctgtaaacaatggtgccccagaaagctgcaggtggtgtttggagaagcagttacttttcagttacaagacccatctccctagtctcagccttacaacaccacgggactaaggaagagcacttccttgcctccgtaaggccagaggaagaaccatcccaatcatttgatctccagctccacagtagagagaaacctacaaaatgtcaaaccagcttcccgactcccaggagctcaagccaagcccagaggcagtggctggggtccctgcaggtcatgaggggcctatgcctttactccttttaaacaccagcacccgtcttttccccaacctaaaaccaaccaccagcatttcactacaggaccaaatggaaaccgagggaaccctgggtcttgggaagaacaacaggaaaccaaggtctgacctagggttccctcccagtcttcacatcactctggcctcatcaccaaggtgacagaggacacaggggagggggaaaacccacacacactccttggaatgggtcctgttatttatgcttgctgcacagacatattagaagaaaaaaaaaaagctttgtattattcttccacatatgctggctgctgtttacacaccctgccaatgccttagcactggagagctttttgcaatatgctggggaaaggggagggagggaatgaaagtgccaaagaaaacatgtttttaagaactcgggttttatacaatagaatgttttctagcagatgcctcttgttttaatatattaaaattttgcaaagccctttgagctactgccttagtctacccactgtccttttgttatgaggtagaggatctcatgacaccatacacacaaacccatcattgcctgtgaatgcacgtagggccagaattccccagttcccgctcctctgagggttgatactgctgggaatgccaaccactccacaagcagagggaagccccctcaggcctgcaggaggagccgcagcagtgtgtccaattcaaaccagcagcaaagagcctgacattttcccatccatctatgaggaaagccatctcacagaacatggacataggcaacttgctctcccacaccaagggatgggaatctctcctacctatagtcatccctgcactcctgactttactccaggacccagggtccaactaatggcagagcccctcttggttccttcaaacaagaaaagcaatacctacggactggtgtacacttccatccttggttataacaggaatgttatcaagctgtcagaacaggatgaagtgctcccagtggatatccatcagggagggttagggacactcgtggcagcctgtctagcagcctgggctctctgaaagtccctaacttcctgaggggtacgcaaatactgttctatttcactatcagaaatgttctcatctccagtgacagtggagacagggggtacagggcagatccgcttcggggacttcaacatgcagggtggcaagagaagggcaggactggccggccgcttcccctggggtaaacctaaggaattatttcccacctccccttctccttgcccctgtccccaccccggtggctccttctctcgggtctccacttctgctgtcccatcccgaaaggcagagcggaccagtgactggcggtgctggagaaggtcaccgatgtgcttcaccacagaccgtttgtcaagtctcagaactcgtaaccaggccagctgctcagccatccgcagcagcacagccagcagctcctgcaggcgggaggacgccgggtagggcaggtccacatttgccaatttacaaaatcgggcaagggaacatgaaagccgatctgcaggctgcagcgactgccaagccaggaaagtcgcagcagtgatgacgggcaagggatgcctcccggtcaccagccacgtctcatttgccagctccaccaactgcattgttcgagacagcatcttctctttgtcttccacgtatttggctggcacagaaggtgaagcttggaacagtttgaagctgaaataaccaaaatgagggttggatcttaatgatataggggctgctctcccacagtgaggaaagacagcccactcaagatggggaagctattctgccctcaggaatactcaagctcactgggcagcaagttaataaaggtagtgagagaaaacagggcgtcttccgcttgttaggggaaggtggagggatggaggagagcacgaacatttattgggcgcctcccaatcaccattattctgagtgctttacaacgttctcatttaatctacgtgcacgtgcaccatcttatgtgcatgtatagttaaaaaactttcccatagtcatccagccaggcagtaaccaagcttcaaatacaaggctatttgacac

SEQ ID NO: 266 - protein, 1542 aa, Homo sapiens; identical to SEQ ID NO: 258

SEQ ID NO: 267 - DNA, 1888 bp, Homo sapiens
  CDS (2)..(1888)
caccggatccgagctgaagcgtttagatctctccaacaaccggattggctgtctcacctccgagaccttccagggcctccccaggcttctccgactaaacatatctggaaacatcttctccagtctgcaacctggggtctttgatgagctgccagcccttaaggttgtggacttgggcaccgagttcctgacctgtgactgccacctgcgctggctgctgccctgggcccagaatcgctccctgcagctgtcggaacacacgctctgtgcttaccccagtgccctgcatgctcaggccctgggcagcctccaggaggcccagctctgctgcgagggggccctggagctgcacacacaccacctcatcccgtccctacgccaagtggtgttccagggggatcggctgcccttccagtgctctgccagctacctgggcaacgacacccgcatccgctggtaccacaaccgagcccctgtggagggtgatgagcaggcgggcatcctcctggccgagagcctcatccacgactgcaccttcatcaccagtgagctgacgctgtctcacatcggcgtgtgggcctcaggcgagtgggagtgcaccgtgtccatggcccaaggcaacgccagcaagaaggtggagatcgtggtgctggagacctctgcctcctactgccccgccgagcgtgttgccaacaaccgcggggacttcaggtggccccgaactctggctggcatcacagcctaccagtcctgcctgcagtatcccttcacctcagtgcccctgggcgggggtgccccgggcacccgagcctcccgccggtgtgaccgtgccggccgctgggagccaggggactactcccactgtctctacaccaacgacatcaccagggtgctgtacaccttcgtgctgatgcccatcaatgcctccaatgcgctgaccctggctcaccagctgcgcgtgtacacagccgaggccgctagcttttcagacatgatggatgtagtctatgtggctcagatgatccagaaatttttgggttatgtcgaccagatcaaagagctggtagaggtgatggtggacatggccagcaacctgatgctggtggacgagcacctgctgtggctggcccagcgcgaggacaaggcctgcagccgcatcgtgggtgccctggagcgcattgggggggccgccctcagcccccatgcccagcacatctcagtgaatgcgaggaacgtggcattggaggcctacctcatcaagccgcacagctacgtgggcctgacctgcacagccttccagaggagggagggaggggtgccgggcacacggccaggaagccctggccagaaccccccacctgagcccgagcccccagctgaccagcagctccgcttccgctgcaccaccgggaggcccaatgtttctctgtcgtccttccacatcaagaacagcgtggccctggcctccatccagctgcccccgagtctattctcatcccttccggctgccctggctcccccggtgcccccagactgcaccctgcaactgctcgtcttccgaaatggccgcctcttccacagccacagcaacacctcccgccctggagctgctgggcctggcaagaggcgtggcgtggccacccccgtcatcttcgcaggaaccagtggctgtggcgtgggaaacctgacagagccagtggccgtttcgctgcggcactgggctgagggagccgaacctgtggccgcttggtggagccaggaggggcccggggaggctgggggctggacctcggagggctgccagctccgctccagccagcccaatgtcagcgccctgcactgccagcacttgggcaatgtggccgtgctcatggagctgagcctcgag

SEQ ID NO: 268 - protein, 629 aa, Homo sapiens
TGSELKRLDLSNNRIGCLTSETFQGLPRLLRLNISGNIFSSLQPGVFDELPALKVVDLGTEFLTCDCHLRWLLPWAQNRSLQLSEHTLCAYPSALHAQALGSLQEAQLCCEGALELHTHHLIPSLRQVVFQGDRLPFQCSASYLGNDTRIRWYHNRAPVEGDEQAGILLAESLIHDCTFITSELTLSHIGVWASGEWECTVSMAQGNASKKVEIVVLETSASYCPAERVANNRGDFRWPRTLAGITAYQSCLQYPFTSVPLGGGAPGTRASRRCDRAGRWEPGDYSHCLYTNDITRVLYTFVLMPINASNALTLAHQLRVYTAEAASFSDMMDVVYVAQMIQKFLGYVDQIKELVEVMVDMASNLMLVDEHLLWLAQREDKACSRIVGALERIGGAALSPHAQHISVNARNVALEAYLIKPHSYVGLTCTAFQRREGGVPGTRPGSPGQNPPPEPEPPADQQLRFRCTTGRPNVSLSSFHIKNSVALASIQLPPSLFSSLPAALAPPVPPDCTLQLLVFRNGRLFHSHSNTSRPGAAGPGKRRGVATPVIFAGTSGCGVGNLTEPVAVSLRHWAEGAEPVAAWWSQEGPGEAGGWTSEGCQLRSSQPNVSALHCQHLGNVAVLMELSLE

SEQ ID NO: 269 - DNA, 1329 bp, Homo sapiens
  CDS (7)..(1323)
ggatcccggctgcccttccagtgctctgccagctacctgggcaacgacacccgcatccgctggtaccacaaccgagcccctgtggagggtgatgagcaggcgggcatcctcctggccgagagcctcatccacgactgcaccttcatcaccaggtggccccgaactctggctggcatcacagcctaccagtcctgcctgcagtatcccttcacctcagtgcccctgggcgggggtgccccgggcacccgagcctcccgccggtgtgaccgtgccggccgctgggagccaggggactactcccactgtctctacaccaacgacatcaccagggtgctgtacaccttcgtgctgatgcccatcaatgcctccaatgcgctgaccctggctcaccagctgcgcgtgtacacagccgaggccgctagcttttcagacatgatggatgtggtctatgtggctcagatgatccagaaatttttgggttatgtcgaccagatcaaagagctggtaggggtgatggtggacatggccagcaacctgatgctggtggacgagcacctgctgtggctggcccagcgcgaggacaaggcctgcagccgcatcgtgggtgccctggagcgcattgggggggccgccctcagcccccatgcccagcacatctcagtgaatgcgaggaacgtggcattggaggcctacctcatcaagccgcacagctacgtgggcctgacctgcacagccttccagaggagggagggaggggtgccgggcacacggccaggaagccctggccagaaccccccacctgagcccgagcccccagctgaccagcagctccgcttccgctgcaccaccgggaggcccaatgtttctctgtcgtccttccacatcaagaacagcgtggccctggcctccatccagctgcccccgagtctattctcatcccttccggctgccctggctcccccggtgcccccagactgcaccctgcaactgctcgtcttccgaaatggccgcctcttccacagccacagcaacgcctcccgccctggagctgctgggcctggcaagaggcgtggcgtggccacccccgtcatcttcgcaggaaccagtggctgtggcgtgggaaacctgacagagtcagtggccgtttcgctgcggcactgggctgagggagccgaacctgtggccgcttggtggagccaggaggggcccggggaggctgggggctggacctcggagggctgccagctccgctccagccagcccaatgtcagcgccctgcactgccagcacttgggcaatgtggccgtgctcatggagctgagcctcgag

SEQ ID NO: 270 - protein, 439 aa, Homo sapiens
RLPFQCSASYLGNDTRIRWYHNRAPVEGDEQAGILLAESLIHDCTFITRWPRTLAGITAYQSCLQYPFTSVPLGGGAPGTRASRRCDRAGRWEPGDYSHCLYTNDITRVLYTFVLMPINASNALTLAHQLRVYTAEAASFSDMMDVVYVAQMIQKFLGYVDQIKELVGVMVDMASNLMLVDEHLLWLAQREDKACSRIVGALERIGGAALSPHAQHISVNARNVALEAYLIKPHSYVGLTCTAFQRREGGVPGTRPGSPGQNPPPEPEPPADQQLRFRCTTGRPNVSLSSFHIKNSVALASIQLPPSLFSSLPAALAPPVPPDCTLQLLVFRNGRLFHSHSNASRPGAAGPGKRRGVATPVIFAGTSGCGVGNLTESVAVSLRHWAEGAEPVAAWWSQEGPGEAGGWTSEGCQLRSSQPNVSALHCQHLGNVAVLMELS

SEQ ID NO: 271 - DNA, 60 bp, Homo sapiens
  CDS (1)..(60)
gagaagcttctcatgagagcacatttttctgatgaagatgaaaagacggcctgtccttct

SEQ ID NO: 272 - protein, 20 aa, Homo sapiens
EKLLMRAHFSDEDEKTACPS

SEQ ID NO: 273 - DNA, 57 bp, Homo sapiens
  CDS (1)..(57)
cgagcctcccgccggtgtgaccgtgccggccgctgggagccaggggactactcccac

SEQ ID NO: 274 - protein, 19 aa, Homo sapiens
RASRRCDRAGRWEPGDYSH

SEQ ID NO: 275 - DNA, 57 bp, Homo sapiens
  CDS (1)..(57)
gagctggtagaggtgatggtggacatgcccagcaacttgatgctggtggacgagcac

SEQ ID NO: 276 - protein, 19 aa, Homo sapiens
ELVEVMVDMPSNLMLVDEH

SEQ ID NO: 277 - DNA, 66 bp, Homo sapiens
  CDS (1)..(66)
aaggcgggcaacagcagggcctccctggaggcaggggaggagctgaggggttccaccaggctcagg

SEQ ID NO: 278 - protein, 22 aa, Homo sapiens
KAGNSRASLEAGEELRGSTRLR

SEQ ID NO: 279 - DNA, 7892 bp, Homo sapiens
  CDS (1)..(4626)
atgcggggggcgcccgcgcgcctgctgctgccgctgctgccgtggctcctgctgctcctggcgcccgaggctcggggcgcgcccggctgcccgctatccatccgcagctgcaagtgctcgggggagcggcccaaggggctgagcggcggcgtccctggcccggctcggcggagggtggtgtgcagcggcggggacctcccggagcctcccgagcccggccttctgcctaacggcaccgttacccttggcaaccgtttctccactgccccttgcccgcagtcggggctggcccagtcttttcgattgtgtccagaacaatacagtaacgcctctggttgggtgagttcagaggctgcccgcttcctgacaggacacaactggtcagcctctgacgctggccgcccggcctgcattttccccggcccggtctcctggagacaggtaccagcttacaacgccggacaggatcagggtagcaaatatagcttctatggaggaaaggtcaaagatgagtatctgcgtaggtccccgatctgtcgctctgctgccgccctgcacactgacaccagtgcccgcagctggtctgaatttaggctcttgagcaataacaagatcacggggctccgcaatggctccttcctgggactgtcactgctggagaagcttctcatgagagcacatttttctgatgaagatgaaaagacggcctgtccttctccagcaccaaggctctggaggctgcatagcaagtgcaccctgagcatggcaggcaatcagaagaaccagggcggcagcagctcacaagaggcagcatctggcttgatgccgagtcggcggctccagcggggagaggttgagggcctctgcacttgcctctgcacggacctgaggaacaacatcatcagcacagtgcagccgggcgccttcctgggcctgggggagctgaagcgtttagatctctccaacaaccggattggctgtctcacctccgagaccttccagggcctccccaggcttctccgactaaacatatctggaaacatcttctccagtctgcaacctggggtctttgatgagctgccagcccttaaggttgtggacttgggcaccgagttcctgacctgtgactgccacctgcgctggctgctgccctgggcccagaatcgctccctgcagctgtcggaacacacgctctgtgcttaccccagtgccctgcatgctcatgccctgggcagcctccaggaggcccagctctgctgcgagggggccctggagctgcacacacaccacctcatcccgtccctacgccaagtggtgttccagggggatcggctgcccttccagtgctctgccagctacctgggcaacgacacccgcatccgctggtaccacaaccgagcccctgtggagggtgatgagcaggcgggcatcctcctggccgagagcctcatccacgactgcaccttcatcaccagtgagctgacgctgtctcacatcggcgtgtgggcctcaggcgagtgggagtgcaccgtgtccatggcccaaggcaacgccagcaagaaggtggagatcgtggtgctggagacctctgcctcctactgccccgccgagcgtgttgccaacaaccgcggggacttcaggtggccccgaactctggctggcatcacagcctaccagtcctgcctgcagtatcccttcacctcagtgcccctgggcgggggtgccccgggcacccgagcctcccgccggtgtgaccgtgccggccgctgggagccaggggactactcccactgtctctacaccaacgacatcaccagggtgctgtacaccttcgtgctgatgcccatcaatgcctccaatgcgctgaccctggctcaccagctgcgcgtgtacacagccgaggccgctagcttttcagacatgatggatgtagtctatgtggctcagatgatccagaaatttttgggttatgtcgaccagatcaaagagctggtagaggtgatggtggacatgcccagcaacttgatgctggtggacgagcacctgctgtggctggcccagcgcgaggacaaggcctgcagccgcatcgtgggtgccatagagcgcattgggggggccgccctcagcccccatgcccagcacatctcagtgaatgcgaggaacatggcattggaggcctacctcatcaagccgcacagctacgtgggcctgacctgcacagccttccagaggagggagggaggggtgccgggcacacggccaggaagccctggccagaaccccccacctgagcccgagcccccagctgaccagcagctccgcttccgctgcaccaccgggaggcccaatgtttctctgtcgtccttccacatcaagaacagcgtggccctggcctccatccagctgcccccgagtctattctcatcccttccggctgccctggctcccccggtgcccccagactgcaccctgcaactgctcgtcttccgaaatggccgcctcttccacagccacagcaacacctcccgccctggagctgctgggcctggcaagaggcgtggcgtggccacccccgtcatcttcgcaggaaccagtggctgtggcgtgggaaacctgacagagccagtggccgtttcgctgcggcactgggctgagggagccgaacctgtggccgcttggtggagccaggaggggcccggggaggctgggggctggacctcggagggctgccagctccgctccagccagcccaatgtcagcgccctgcactgccagcacttgggcaatgtggccgtgctcatggagctgagcgcctttcccagggaggtggggggcgccggggcagggctgcaccccgtggtatacccctgcacggccttgctgctgctctgcctcttcgccaccatcatcacctacatcctcaaccacagctccatccgtgtgtcccggaaaggctggcacatgctgctgaacttgtgcttccacatagccatgacctctgctgtctttgcggggggcatcacactcaccaactaccagatggtctgccaggcggtgggcatcaccctgcactactcctccctatccacgctgctctggatgggcgtgaaggcgcgagtgctccataaggagctcacctggagggcaccccctccgcaagaaggggaccccgctctgcctactcccagtcctatgctccggtacatactttcaattccagctttgcaattggggagggactccaacgcaggcgtaggaaacctcccaaggttctatttgatcgctggagggattccactcattatctgtggcatcacagctgcagtcaacatccacaactaccgggaccacagcccctactgctggctggtgtggcgtccaagccttggcgccttctacatccctgtggctttgattctgctcatcacctggatctatttcctgtgcgccgggctacgcttacggggtcctctggcacagaaccccaaggcgggcaacagcagggcctccctggaggcaggggaggagctgaggggttccaccaggctcaggggcagcggccccctcctgagtgactcaggttcccttcttgctactgggagcgcgcgagtggggacgcccgggcccccggaggatggtgacagcctctattctccgggagtccagctaggggcgctggtgaccacgcacttcctgtacttggccatgtgggcctgcggggctctggcagtgtcccagcgctggctgccccgggtggtgtgcagctgcttgtacggggtggcagcctccgccctgggcctcttcgtcttcactcaccactgtgccaggcggagggacgtgagagcctcgtggcgcgcctgctgcccccctgcctctcccgcggccccccatgccccgccccgggccctgcccgccgccgcagaggacggttccccggtgttcggggaggggcccccctccctcaagtcctccccaagcggcagcagcggccatccgctggctctgggcccctgcaagctcaccaacctgcagctggcccagagtcaggtgtgcgaggcgggggcggcggccggcggggaaggagagccggagccggcgggcacccggggaaacctcgcccaccgccaccccaacaacgtgcaccacgggcgtcgggcgcacaagagccgggccaagggacaccgcgcgggggaggcctgcggcaagaaccggctcaaggccctgcgcgggggcgcggcgggggcgctggaactgctgtccagcgagagcggtagtctgcacaacagccccaccgacagctacctgggcagcagccgcaacagcccgggcgccggcctgcagctggaaggcgagcccatgctcacgccgtccgagggcagcgacaccagcgccgcgccgctttctgaggcgggccgggcaggccagcgccgcagcgccagccgcgacagtctcaagggcggcggcgcgctggagaaggagagccatcgccgctcgtacccgctcaacgccgccagcctaaacggcgcccccaaggggggcaagtacgacgacgtcaccctgatgggcgcggaggtagccagcggcggctgcatgaagaccggactctggaagagcgaaactaccgtctaaggtggggcgggcgacgcggtagacgggttggccacgcggctcgttcccccgctcctcggggccctccaaggtgtctccgtagtcagcaggttggaggcagaggagccgatggctggaggaagcccacaggcggatgttccccacttgcctagagggcatccctctggggtagcgacagacaatcccagaaacacgcataatacatttccgtccagcccggggcagtctgactgtcggtgccctcccaggaacggggaaggcctccgtctgtgtgaaagggcacagcacatcccaggtgcaccctccccaagtactcccaccccgcctactgtccatgcggcctcactgggggccatcagcctcaccagcaaagcagagatgagagcgtgggaactgtgttctttcctccctgccctctactgatttcagcccagcccctgcctagatcctaggtcccttttcctcccgagtttggctggcacgagagctagcccagcacatgaagcaggtgatgttaagtcacaaggtgctgcttttcagatccactatgcaagaggggagggtggggccacgtgaaaggcagctctagacatcaaccagtcctgggggaggggagtgggaaccgggcacaactaggaacaatgccaccattcccacaggagtggtacttaaaccagacagcagggttcagaggtggcacaccgggacaaagctgaggccctgcacctcaacagctgactgccaggtgcctgtgggtgaactgaggggagtagagggagagggcaggtggaactggggcagaatctagtcatgccctaaagctagtcctgtaaacaatggtgccccagaaagctgcaggtggtgtttggagaagcagttacttttcagttacaagacccatctccctagtctcagccttacaacaccacgggactaaggaagagcacttccttgcctccgtaaggccagaggaagaaccatcccaatcatttgatctccagctccacagtagagagaaacctacaaaatgtcaaaccagcttcccgactcccaggagctcaagccaagcccagaggcagtggctggggtccctgcaggtcatgaggggcctatgcctttactccttttaaacaccagcacccgtcttttccccaacctaaaaccaaccaccagcatttcactacaggaccaaatggaaaccgagggaaccctgggtcttgggaagaacaacaggaaaccaaggtctgacctagggttccctcccagtcttcacatcactctggcctcatcaccaaggtgacagaggacacaggggagggggaaaacccacacacactccttggaatgggtcctgttatttatgcttgctgcacagacatattagaagaaaaaaaaaaagctttgtattattcttccacatatgctggctgctgtttacacaccctgccaatgccttagcactggagagctttttgcaatatgctggggaaaggggagggagggaatgaaagtgccaaagaaaacatgtttttaagaactcgggttttatacaatagaatgttttctagcagatgcctcttgttttaatatattaaaattttgcaaagccctttgagctactgccttagtctacccactgtccttttgttatgaggtagaggatctcatgacaccatacacacaaacccatcattgcctgtgaatgcacgtagggccagaattccccagttcccgctcctctgagggttgatactgctgggaatgccaaccactccacaagcagagggaagccccctcaggcctgcaggaggagccgcagcagtgtgtccaattcaaaccagcagcaaagagcctgacattttcccatccatctatgaggaaagccatctcacagaacatggacataggcaacttgctctcccacaccaagggatgggaatctctcctacctatagtcatccctgcactcctgactttactccaggacccagggtccaactaatggcagagcccctcttggttccttcaaacaagaaaagcaatacctacggactggtgtacacttccatccttggttataacaggaatgttatcaagctgtcagaacaggatgaagtgctcccagtggatatccatcagggagggttagggacactcgtggcagcctgtctagcagcctgggctctctgaaagtccctaacttcctgaggggtacgcaaatactgttctatttcactatcagaaatgttctcatctccagtgacagtggagacagggggtacagggcagatccgcttcggggacttcaacatgcagggtggcaagagaagggcaggactggccggccgcttcccctggggtaaacctaaggaattatttcccacctccccttctccttgcccctgtccccaccccggtggctccttctctcgggtctccacttctgctgtcccatcccgaaaggcagagcggaccagtgactggcggtgctggagaaggtcaccgatgtgcttcaccacagaccgtttgtcaagtctcagaactcgtaaccaggccagctgctcagccatccgcagcagcacagccagcagctcctgcaggcgggaggacgccgggtagggcaggtccacatttgccaatttacaaaatcgggcaagggaacatgaaagccgatctgcaggctgcagcgactgccaagccaggaaagtcgcagcagtgatgacgggcaagggatgcctcccggtcaccagccacgtctcatttgccagctccaccaactgcattgttcgagacagcatcttctctttgtcttccacgtatttggctggcacagaaggtgaagcttggaacagtttgaagctgaaataaccaaaatgagggttggatcttaatgatataggggctgctctcccacagtgaggaaagacagcccactcaagatggggaagctattctgccctcaggaatactcaagctcactgggcagcaagttaataaaggtagtgagagaaaacagggcgtcttccgcttgttaggggaaggtggagggatggaggagagcacgaacatttattgggcgcctcccaatcaccattattctgagtgctttacaacgttctcatttaatctacgtgcacgtgcaccatcttatgtgcatgtatagttaaaaaactttcccatagtcatccagccaggcagtaaccaagcttcaaatacaaggctatttgacaccaacagcctctactttcaacgttatttatcag

SEQ ID NO: 280 - protein, 1542 aa, Homo sapiens
MRGAPARLLLPLLPWLLLLLAPEARGAPGCPLSIRSCKCSGERPKGLSGGVPGPARRRVVCSGGDLPEPPEPGLLPNGTVTLGNRFSTAPCPQSGLAQSFRLCPEQYSNASGWVSSEAARFLTGHNWSASDAGRPACIFPGPVSWRQVPAYNAGQDQGSKYSFYGGKVKDEYLRRSPICRSAAALHTDTSARSWSEFRLLSNNKITGLRNGSFLGLSLLEKLLMRAHFSDEDEKTACPSPAPRLWRLHSKCTLSMAGNQKNQGGSSSQEAASGLMPSRRLQRGEVEGLCTCLCTDLRNNIISTVQPGAFLGLGELKRLDLSNNRIGCLTSETFQGLPRLLRLNISGNIFSSLQPGVFDELPALKVVDLGTEFLTCDCHLRWLLPWAQNRSLQLSEHTLCAYPSALHAHALGSLQEAQLCCEGALELHTHHLIPSLRQVVFQGDRLPFQCSASYLGNDTRIRWYHNRAPVEGDEQAGILLAESLIHDCTFITSELTLSHIGVWASGEWECTVSMAQGNASKKVEIVVLETSASYCPAERVANNRGDFRWPRTLAGITAYQSCLQYPFTSVPLGGGAPGTRASRRCDRAGRWEPGDYSHCLYTNDITRVLYTFVLMPINASNALTLAHQLRVYTAEAASFSDMMDVVYVAQMIQKFLGYVDQIKELVEVMVDMPSNLMLVDEHLLWLAQREDKACSRIVGAIERIGGAALSPHAQHISVNARNMALEAYLIKPHSYVGLTCTAFQRREGGVPGTRPGSPGQNPPPEPEPPADQQLRFRCTTGRPNVSLSSFHIKNSVALASIQLPPSLFSSLPAALAPPVPPDCTLQLLVFRNGRLFHSHSNTSRPGAAGPGKRRGVATPVIFAGTSGCGVGNLTEPVAVSLRHWAEGAEPVAAWWSQEGPGEAGGWTSEGCQLRSSQPNVSALHCQHLGNVAVLMELSAFPREVGGAGAGLHPVVYPCTALLLLCLFATIITYILNHSSIRVSRKGWHMLLNLCFHIAMTSAVFAGGITLTNYQMVCQAVGITLHYSSLSTLLWMGVKARVLHKELTWRAPPPQEGDPALPTPSPMLRYILSIPALQLGRDSNAGVGNLPRFYLIAGGIPLIICGITAAVNIHNYRDHSPYCWLVWRPSLGAFYIPVALILLITWIYFLCAGLRLRGPLAQNPKAGNSRASLEAGEELRGSTRLRGSGPLLSDSGSLLATGSARVGTPGPPEDGDSLYSPGVQLGALVTTHFLYLAMWACGALAVSQRWLPRVVCSCLYGVAASALGLFVFTHHCARRRDVRASWRACCPPASPAAPHAPPRALPAAAEDGSPVFGEGPPSLKSSPSGSSGHPLALGPCKLTNLQLAQSQVCEAGAAAGGEGEPEPAGTRGNLAHRHPNNVHHGRRAHKSRAKGHRAGEACGKNRLKALRGGAAGALELLSSESGSLHNSPTDSYLGSSRNSPGAGLQLEGEPMLTPSEGSDTSAAPLSEAGRAGQRRSASRDSLKGGGALEKESHRRSYPLNAASLNGAPKGGKYDDVTLMGAEVASGGCMKTGLWKSETTV

SEQ ID NO: 281 - DNA, 1271 bp, Homo sapiens
  CDS (48)..(1055)
gcgcagtgtgctggaattcgcccttcctccgtgccgcctctgccgcgatgcccccccctgcgcccggggcccggctccggcttctcgccgccgccgccctggccggcttggccgtcatcagccgagggctgctctcccagagcctggagttcaactctcctgccgacaactacacagtgtgtgaaggtgacaacgccaccctcagctgcttcatcgacgagcacgtgacccgcgtggcctggctgaaccgctccaacatcctgtatgccggcaatgaccgctggaccagcgacccgcgggtgcggctgctcatcaacacccccgaggagttctccatcctcatcaccgaggtggggctcggcgacgagggcctctacacctgctccttccagacccgccaccagccgtacaccactcaggtctacctcattgtccacgtccctgcccgcattgtgaacatctcgtcgcctgtgatggtgaatgaggggggcaatgtgaacctgctttgcctggccgtggggcggccagagcccacggtcacctggagacagctccgagacggcttcacctcggagggagagatcctggagatctctgacatccagcggggccaggccggggagtatgagtgcgtgactcacaacggggttaactcggcgcccgacagccgccgcgtgctggtcacagtcaactatcctccgaccatcacggacgtgaccagcgcccgcaccgcgctgggccgggccgccctcctgcgctgcgaagccatggcggttccccccgcggatttccagtggtataaggatgacagactgctgagcagcggcacggccgaaggcctgaaggtgcagatggagcgcacccgctcgatgcttctctttgccaacgtgagcgcccggcattacggcaactatacgtgttgcgccgccaaccgactgggagcgtccagcgcctccatgcggctcctgtgcccaggatccctggagaactcagccccgaggcccccagggctcctggccctcctctccgccctgggctggctgtggtggagaatgtaggcgcaacccagtggagctcgcctccccctgcagggggcctcaggccaagagtgagagaaaagggggagcaagagccctgggtctcgtgggggcagaagggctctcggccaccaaggaagaagagaagaggagaaagaggaggaggcagaggaagaaagatctttagagaacccatcactgtgagggataacgcaaaattatgcatctttctac

SEQ ID NO: 282 - protein, 336 aa, Homo sapiens
MPPPAPGARLRLLAAAALAGLAVISRGLLSQSLEFNSPADNYTVCEGDNATLSCFIDEHVTRVAWLNRSNILYAGNDRWTSDPRVRLLINTPEEFSILITEVGLGDEGLYTCSFQTRHQPYTTQVYLIVHVPARIVNISSPVMVNEGGNVNLLCLAVGRPEPTVTWRQLRDGFTSEGEILEISDIQRGQAGEYECVTHNGVNSAPDSRRVLVTVNYPPTITDVTSARTALGRAALLRCEAMAVPPADFQWYKDDRLLSSGTAEGLKVQMERTRSMLLFANVSARHYGNYTCCAANRLGASSASMRLLCPGSLENSAPRPPGLLALLSALGWLWWRM

SEQ ID NO: 283 - DNA, 1033 bp, Homo sapiens
  CDS (2)..(1033)
caccaagcttcccaccatgcccccccctgcgcccggggcccggctccggcttctcgccgccgccgccctggccggcttggccgtcatcagccgagggctgctctcccagagcctggagttcaactctcctgccgacaactacacagtgtgtgaaggtgacaacgccaccctcagctgcttcatcgacgagcacgtgacccgcgtggcctggctgaaccgctccaacatcctgtatgccggcaatgaccgctggaccagcgacccgcgggtgcggctgctcatcaacacccccgaggagttctccatcctcatcaccgaggtggggctcggcgacgagggcctctacacctgctccttccagacccgccaccagccgtacaccactcaggtctacctcattgtccacgtccctgcccgcattgtgaacatctcgtcgcctgtgacggtgaatgaggggggcaatgtgaacctgctttgcctggccgtggggcggccagagcccacggtcacctggagacagctccgagacggcttcacctcggagggagagatcctggagatctctgacatccagcggggccaggccggggagtatgagtgcgtgactcacaacggggttaactcggcgcccgacagccgccgcgtgctggtcacagtcaactatcctccgaccatcacggacgtgaccagcgcccgcaccgcgctgggccgggccgccctcctgcgctgcgaagccatggcggttccccccgcggatttccagtggtacaaggatgacagactgctgagcagcggcacggccgaaggcctgaaggtgcagacggagcgcacccgctcgatgcttctctttgccaacgtgagcgcccggcattacggcaactatacgtgtcgcgccgccaaccgactgggagcgtccagcgcctccatgcggctcctgcgcccaggatccctggagaactcagccccgaggcccccagggctcctggccctcctctccgccctgggctggctgtggtggagaatgctcgagggc

SEQ ID NO: 284 - protein, 344 aa, Homo sapiens
TKLPTMPPPAPGARLRLLAAAALAGLAVISRGLLSQSLEFNSPADNYTVCEGDNATLSCFIDEHVTRVAWLNRSNILYAGNDRWTSDPRVRLLINTPEEFSILITEVGLGDEGLYTCSFQTRHQPYTTQVYLIVHVPARIVNISSPVTVNEGGNVNLLCLAVGRPEPTVTWRQLRDGFTSEGEILEISDIQRGQAGEYECVTHNGVNSAPDSRRVLVTVNYPPTITDVTSARTALGRAALLRCEAMAVPPADFQWYKDDRLLSSGTAEGLKVQTERTRSMLLFANVSARHYGNYTCRAANRLGASSASMRLLRPGSLENSAPRPPGLLALLSALGWLWWRMLEG

SEQ ID NO: 285 - DNA, 976 bp, Homo sapiens
  CDS (2)..(976)
caccaagcttctggccggcttggccgtcatcagccgagggctgctctcccagagcctggagttcaactctcctgccgacaactacacagtgtgtgaaggtgacaacgccaccctcagctgcttcatcgacgagcacgtgacccgcgtggcctggctgaaccgctccaacatcctgtatgccggcaatgaccgctggaccagcgacccgcgggtgcggctgctcatcaacacccccgaggagttctccatcctcatcaccgaggtggggctcggcgacgagggcctctacacctgctccttccagacccgccaccagccgtacaccactcaggtctacctcattgtccacgtccctgcccgcattgtgaacatctcgtcgcctgtgacggtgaatgaggggggcaatgtgaacctgctttgcctggccgtggggcggccagagcccacggtcacctggagacagctccgagacggcttcacctcggagggagagatcctggagatctctgacatccagcggggccaggccggggagtatgagtgcgtgactcacaacggggttaactcggcgcccgacagccgccgcgtgctggtcacagtcaactatcctccgaccatcacggacgtgaccagcgcccgcaccgcgctgggccgggccgccctcctgcgctgcgaagccatggcggttccccccgcggatttccagtggtacaaggatgacagactgctgagcagcggcacggccgaaggcctgaaggtgcagacggagcgcacccgctcgatgcttctctttgccaacgtgagcgcccggcattacggcaactatacgtgtcgcgccgccaaccgactgggagcgtccagcgcctccatgcggctcctgcgcccaggatccctggagaactcagccccgaggcccccagggctcctggccctcctctccgccctgggctggctgtggtggagaatgctcgagggc

SEQ ID NO: 286 - protein, 325 aa, Homo sapiens
TKLLAGLAVISRGLLSQSLEFNSPADNYTVCEGDNATLSCFIDEHVTRVAWLNRSNILYAGNDRWTSDPRVRLLINTPEEFSILITEVGLGDEGLYTCSFQTRHQPYTTQVYLIVHVPARIVNISSPVTVNEGGNVNLLCLAVGRPEPTVTWRQLRDGFTSEGEILEISDIQRGQAGEYECVTHNGVNSAPDSRRVLVTVNYPPTITDVTSARTALGRAALLRCEAMAVPPADFQWYKDDRLLSSGTAEGLKVQTERTRSMLLFANVSARHYGNYTCRAANRLGASSASMRLLRPGSLENSAPRPPGLLALLSALGWLWWRMLEG

SEQ ID NO: 287 - DNA, 760 bp, Homo sapiens
  CDS (2)..(760)
caccaagcttggtgacaacgccaccctcagctgcttcatcgacgagcacgtgacccgcgtggcctggctgaaccgctccaacatcctgtatgccggcaatgaccgctggaccagcgacccgcgggtgcggctgctcatcaacacccccgaggagttctccatcctcatcaccgaggtggggctcggcgacgagggcctctacacctgctccttccagacccgccaccagccgtacaccactcaggtctacctcattgtccacgtccctgcccgcattgtgaacatctcgtcgcctgtgacggtgaatgaggggggcaatgtgaacctgctttgcctggccgtggggcggccagagcccacggtcacctggagacagctccgagacggcttcacctcggagggagagatcctggagatctctgacatccagcggggccaggccggggagtatgagtgcgtgactcacaacggggttaactcggcgcccgacagccgccgcgtgctggtcacagtcaactatcctccgaccatcacggacgtgaccagcgcccgcaccgcgctgggccgggccgccctcctgcgctgcgaagccatggcggttccccccgcggatttccagtggtacaaggatgacagactgctgagcagcggcacggccgaaggcctgaaggtgcagacggagcgcacccgctcgatgcttctctttgccaacgtgagcgcccggcattacggcaactatacgtgtcgcgccctcgagggc

SEQ ID NO: 288 - protein, 253 aa, Homo sapiens
TKLGDNATLSCFIDEHVTRVAWLNRSNILYAGNDRWTSDPRVRLLINTPEEFSILITEVGLGDEGLYTCSFQTRHQPYTTQVYLIVHVPARIVNISSPVTVNEGGNVNLLCLAVGRPEPTVTWRQLRDGFTSEGEILEISDIQRGQAGEYECVTHNGVNSAPDSRRVLVTVNYPPTITDVTSARTALGRAALLRCEAMAVPPADFQWYKDDRLLSSGTAEGLKVQTERTRSMLLFANVSARHYGNYTCRALEG

SEQ ID NO: 289 - DNA, 946 bp, Homo sapiens
  CDS (2)..(946)
caccaagcttctgctctcccagagcctggagttcaactctcctgccgacaactacacagtgtgtgaaggtgacaacgccaccctcagctgcttcatcgacgagcacgtgacccgcgtggcctggctgaaccgctccaacatcctgtatgccggcaatgaccgctggaccagcgacccgcgggtgcggctgctcatcaacacccccgaggagttctccatcctcatcaccgaggtggggctcggcgacgagggcctctacacctgctccttccagacccgccaccagccgtacaccactcaggtctacctcattgtccacgtccctgcccgcattgtgaacatctcgtcgcctgtgacggtgaatgaggggggcaatgtgaacctgctttgcctggccgtggggcggccagagcccacggtcacctggagacagctccgagacggcttcacctcggagggagagatcctggagatctctgacatccagcggggccaggccggggagtatgagtgcgtgactcacaacggggttaactcggcgcccgacagccgccgcgtgctggtcacagtcaactatcctccgaccatcacggacgtgaccagcgcccgcaccgcgctgggccgggccgccctcctgcgctgcgaagccatggcggttccccccgcggatttccagtggtacaaggatgacagactgctgagcagcggcacggccgaaggcctgaaggtgcagacggagcgcacccgctcgatgcttctctttgccaacgtgagcgcccggcattacggcaactatacgtgtcgcgccgccaaccgactgggagcgtccagcgcctccatgcggctcctgcgcccaggatccctggagaactcagccccgaggcccccagggctcctggccctcctctccgccctgggctggctgtggtggagaatgctcgagggc

SEQ ID NO: 290 - protein, 315 aa, Homo sapiens
TKLLLSQSLEFNSPADNYTVCEGDNATLSCFIDEHVTRVAWLNRSNILYAGNDRWTSDPRVRLLINTPEEFSILITEVGLGDEGLYTCSFQTRHQPYTTQVYLIVHVPARIVNISSPVTVNEGGNVNLLCLAVGRPEPTVTWRQLRDGFTSEGEILEISDIQRGQAGEYECVTHNGVNSAPDSRRVLVTVNYPPTITDVTSARTALGRAALLRCEAMAVPPADFQWYKDDRLLSSGTAEGLKVQTERTRSMLLFANVSARHYGNYTCRAANRLGASSASMRLLRPGSLENSAPRPPGLLALLSALGWLWWRMLEG

SEQ ID NO: 291 - DNA, 976 bp, Homo sapiens; identical to SEQ ID NO: 285
  CDS (11)..(967)

SEQ ID NO: 292 - protein, 319 aa, Homo sapiens
LAGLAVISRGLLSQSLEFNSPADNYTVCEGDNATLSCFIDEHVTRVAWLNRSNILYAGNDRWTSDPRVRLLINTPEEFSILITEVGLGDEGLYTCSFQTRHQPYTTQVYLIVHVPARIVNISSPVTVNEGGNVNLLCLAVGRPEPTVTWRQLRDGFTSEGEILEISDIQRGQAGEYECVTHNGVNSAPDSRRVLVTVNYPPTITDVTSARTALGRAALLRCEAMAVPPADFQWYKDDRLLSSGTAEGLKVQTERTRSMLLFANVSARHYGNYTCRAANRLGASSASMRLLRPGSLENSAPRPPGLLALLSALGWLWWRM

SEQ ID NO: 293 - DNA, 976 bp, Homo sapiens
  CDS (2)..(976)
cacctcgcgactggccggcttggccgtcatcagccgagggctgctctcccagagcctggagttcaactctcctgccgacaactacacagtgtgtgaaggtgacaacgccaccctcagctgcttcatcgacgagcacgtgacccgcgtggcctggctgaaccgctccaacatcctgtatgccggcaatgaccgctggaccagcgacccgcgggtgcggctgctcatcaacacccccgaggagttctccatcctcatcaccgaggtggggctcggcgacgagggcctctacacctgctccttccagacccgccaccagccgtacaccactcaggtctacctcattgtccacgtccctgcccgcattgtgaacatctcgtcgcctgtgacggtgaatgaggggggcaatgtgaacctgctttgcctggccgtggggcggccagagcccacggtcacctggagacagctccgagacggcttcacctcggagggagagatcctggagatctctgacatccagcggggccaggccggggagtatgagtgcgtgactcacaacggggttaactcggcgcccgacagccgccgcgtgctggtcacagtcaactatcctccgaccatcacggacgtgaccagcgcccgcaccgcgctgggccgggccgccctcctgcgctgcgaagccatggcggttccccccgcggatttccagtggtacaaggatgacagactgctgagcagcggcacggccgaaggcctgaaggtgcagacggagcgcacccgctcgatgcttctctttgccaacgtgagcgcccggcattacggcaactatacgtgtcgcgccgccaaccgactgggagcgtccagcgcctccatgcggctcctgcgcccaggatccctggagaactcagccccgaggcccccagggctcctggccctcctctccgccctgggctggctgtggtggagaatggtcgacggc

SEQ ID NO: 294 - protein, 325 aa, Homo sapiens
TSRLAGLAVISRGLLSQSLEFNSPADNYTVCEGDNATLSCFIDEHVTRVAWLNRSNILYAGNDRWTSDPRVRLLINTPEEFSILITEVGLGDEGLYTCSFQTRHQPYTTQVYLIVHVPARIVNISSPVTVNEGGNVNLLCLAVGRPEPTVTWRQLRDGFTSEGEILEISDIQRGQAGEYECVTHNGVNSAPDSRRVLVTVNYPPTITDVTSARTALGRAALLRCEAMAVPPADFQWYKDDRLLSSGTAEGLKVQTERTRSMLLFANVSARHYGNYTCRAANRLGASSASMRLLRPGSLENSAPRPPGLLALLSALGWLWWRMVDG

SEQ ID NO: 295 - DNA, 1018 bp, Homo sapiens
  CDS (1)..(957)
ctggccggcttggccgtcatcagccgagggctgctctcccagagcctggagttcaactctcctgccgacaactacacagtgtgtgaaggtgacaacgccaccctcagctgcttcatcgacgagcacgtgacccgcgtggcttggctgaaccgctccaacatcctgtatgccggcaatgaccgctggaccagcgacccgcgggtgcggctgctcatcaacacccccgaggagttctccatcctcatcaccgaggtggggctcggcgacgagggcctctacacctgctccttccagacccgccaccagccgtacaccactcaggtctacctcattgtccacgtccctgcccgcattgtgaacatctcgtcgcctgtgacggtgaatgaggggggcaatgtgaacctgctttgcctggccgtggggcggccagagcccacggtcacctggagacagctccgagacggcttcacctcggagggagagatcctggagatctctgacatccagcggggccaggccggggagtatgagtgcgtgactcacaacggggttaactcggcgcccgacagccgccgcgtgctggtcacagtcaactatcctccgaccatcacggacgtgaccagcgcccgcaccgcgctgggccggaccgccctcctgcgctgcgaagccatggcggttccccccgcggatttccagtggtacaaggatgacagactgctgagcagcggcacggccgaaggcctgaaggtgcagacggagcgcacccgctcgatgcttctctttgccaacgtgagcgcccggcattacggcaactatacgtgtcgcgccgccaatcgactgggagcgtccagcgcctccatgcggctcctgcgcccaggatccctggagaactcagccccgaggcccccagggctcctggccctcctctccgccctgggctggctgtggtggagaatgtaggcgcaacccagtccagctcacctccccctgcagggggcctcaaaccaagagtgagaga

SEQ ID NO: 296 - protein, 319 aa, Homo sapiens
LAGLAVISRGLLSQSLEFNSPADNYTVCEGDNATLSCFIDEHVTRVAWLNRSNILYAGNDRWTSDPRVRLLINTPEEFSILITEVGLGDEGLYTCSFQTRHQPYTTQVYLIVHVPARIVNISSPVTVNEGGNVNLLCLAVGRPEPTVTWRQLRDGFTSEGEILEISDIQRGQAGEYECVTHNGVNSAPDSRRVLVTVNYPPTITDVTSARTALGRTALLRCEAMAVPPADFQWYKDDRLLSSGTAEGLKVQTERTRSMLLFANVSARHYGNYTCRAANRLGASSASMRLLRPGSLENSAPRPPGLLALLSALGWLWWRM

SEQ ID NO: 297 - DNA, 926 bp, Homo sapiens
  CDS (1)..(921)
tcccagagcctggagttcaactctcctgccgacaactacacagtgtgtgaaggtgacaacgccaccctcagctgcttcatcgacgagcacgtgacccgcgtggcctggctgaaccgctccaacatcctgtatgccggcaatgaccgctggaccagcgacccgcgggtgcggctgctcatcaacacccccgaggagttctccatcctcatcaccgaggtggggctcggcgacgagggcctctacacctgctccttccagacccgccaccagccgtacaccactcaggtctacctcattgtccacgtccctgcccgcattgtgaacatctcgtcgcctgtgacggtgaatgaggggggcaatgtgaacctgctttgcctggccgtggggcggccagagcccacggtcacctggagacagctccgagacggcttcacctcggagggagagatcctggagatctctgacatccagcggggccaggccggggagtatgagtgcgtgactcacaacggggttaactcggcgcccgacagccgccgcgtgctggtcacagtcaactatcctccgaccatcacggacgtgaccagcgcccgcaccgcgctgggccgggccgccctcctgcgctgcgaagccatggcggttccccccgcggatttccagtggtacaaggatgacagactgctgagcagcggcacggccgaaggcctgaaggtgcagacggagcgcacccgctcgatgcttctctttgccaacgtgagcgcccggcattacggcaactatacgtgtcgcgccgccaaccgactgggagcgtccagcgcctccatgcggctcctgcgcccaggatccctggagaactcagccccgaggcccccagggctcctggccctcctctccgccctgggctggctgtggtggagaatgtaggc

SEQ ID NO: 298 - protein, 307 aa, Homo sapiens
SQSLEFNSPADNYTVCEGDNATLSCFIDEHVTRVAWLNRSNILYAGNDRWTSDPRVRLLINTPEEFSILITEVGLGDEGLYTCSFQTRHQPYTTQVYLIVHVPARIVNISSPVTVNEGGNVNLLCLAVGRPEPTVTWRQLRDGFTSEGEILEISDIQRGQAGEYECVTHNGVNSAPDSRRVLVTVNYPPTITDVTSARTALGRAALLRCEAMAVPPADFQWYKDDRLLSSGTAEGLKVQTERTRSMLLFANVSARHYGNYTCRAANRLGASSASMRLLRPGSLENSAPRPPGLLALLSALGWLWWRM

SEQ ID NO: 299 - DNA, 1171 bp, Homo sapiens
  CDS (1)..(957)
ctggccggcttggccgtcatcagccgagggctgctctcccagagcctggagttcaactctcctgccgacaactacacagtgtgtgaaggtgacaacgccaccctcagctgcttcatcgacgagcacgtgacccgcgtggcctggctgaaccgctccaacatcctgtatgccggcaatgaccgctggaccagcgacccgcgggtgtggctgctcatcaacacccccgaggagttctccatcctcatcaccgaggtggggctcggcgacgagggcctctacacctgctccttccagacccgccaccagccgtacaccactcaggtctacctcattgtccacgtccctgcccgcattgtgaacatctcgtcgcctgtgatggtgaatgaggggggcaatgtgaacctgctttgcctggccgtggggcggccagagcccacggtcacctggagacagctccgagacggcttcacctcggagggagagatcctggagatctctgacatccagcggggccaggccggggagtatgagtgcgtgactcacaacggggttaactcggcgcccgacagccgccgcgtgctggtcacagtcaactatcctccgaccatcacggacgtgaccagcgcccgcaccgcgctgggccgggccgccctcctgcgctgcgaagccatggcggttccccccgcggatttccagtggtataaggatgacagactgctgagcagcggcacggccgaaggcctgaaggtgcagatggagcgcacccgctcgatgcttctctttgccaacgtgagcgcccggcattacggcaactatacgtgtcgcgccgccaaccgactgggagcgtccagcgcctccatgcggctcctgcgcccaggatccctggagaactcagccccgaggcccccagggctcctggccctcctctccgccctgggctggctgtggtggagaatgtaggcgcaacccagtggagctcacctccccctgcagggggcctcaggccaagagtgagagaaacgggggagcaagagccgtgggtctcgtgggggcagaagagctctcggccaccaaggaagaagagagaggagaagaggaggaggcagaggaagaaagatcttcagagaacccatcactgtgagggataacgcaaaattatgcatctttctac

SEQ ID NO: 300 - protein, 319 aa, Homo sapiens
LAGLAVISRGLLSQSLEFNSPADNYTVCEGDNATLSCFIDEHVTRVAWLNRSNILYAGNDRWTSDPRVWLLINTPEEFSILITEVGLGDEGLYTCSFQTRHQPYTTQVYLIVHVPARIVNISSPVMVNEGGNVNLLCLAVGRPEPTVTWRQLRDGFTSEGEILEISDIQRGQAGEYECVTHNGVNSAPDSRRVLVTVNYPPTITDVTSARTALGRAALLRCEAMAVPPADFQWYKDDRLLSSGTAEGLKVQMERTRSMLLFANVSARHYGNYTCRAANRLGASSASMRLLRPGSLENSAPRPPGLLALLSALGWLWWRM

SEQ ID NO: 301 - DNA, 927 bp, Homo sapiens
  CDS (1)..(927)
ttggccgtcatcagccgagggctgctctcccagagcctggagttcaactctcctgccgacaactacacagtgtgtgaaggtgacaacgccaccctcagctgcttcatcgacgagcacgtgacccgcgtggcctggctgaaccgctccaacatcctgtatgccggcaatgaccgctggaccagcgacccgcgggtgcggctgctcatcaacacccccgaggagttctccatcctcatcaccgaggtggggctcggcgacgagggcctctacacctgctccttccagacccgccaccagccgtacaccactcaggtctacctcattgtccacgtccctgcccgcattgtgaacatctcgtcgcctgtgacggtgaatgaggggggcaatgtgaacctgctttgcctggccgtggggcggccagagcccacggtcacctggagacagctccgagacggcttcacctcggagggagagatcctggagatctctgacatccagcggggccaggccggggagtatgagtgcgtgactcacaacggggttaactcggcgcccgacagccgccgcgtgctggtcacagtcaactatcctccgaccatcacggacgtgaccagcgcccgcaccgcgctgggccgggccgccctcctgcgctgcgaagccatggcggttccccccgcggatttccagtggtacaaggatgacagactgctgagcagcggcacggccgaaggcctgaaggtgcagacggagcgcacccgctcgatgcttctctttgccaacgtgagcgcccggcattacggcaactatacgtgtcgcgccgccaaccgactgggagcgtccagcgcctccatgcggctcctgcgcccaggatccctggagaactcagccccgaggcccccagggctcctggccctcctctccgccctg

SEQ ID NO: 302 - protein, 309 aa, Homo sapiens
LAVISRGLLSQSLEFNSPADNYTVCEGDNATLSCFIDEHVTRVAWLNRSNILYAGNDRWTSDPRVRLLINTPEEFSILITEVGLGDEGLYTCSFQTRHQPYTTQVYLIVHVPARIVNISSPVTVNEGGNVNLLCLAVGRPEPTVTWRQLRDGFTSEGEILEISDIQRGQAGEYECVTHNGVNSAPDSRRVLVTVNYPPTITDVTSARTALGRAALLRCEAMAVPPADFQWYKDDRLLSSGTAEGLKVQTERTRSMLLFANVSARHYGNYTCRAANRLGASSASMRLLRPGSLENSAPRPPGLLALLSAL

SEQ ID NO: 303 - DNA, 1169 bp, Homo sapiens
  CDS (71)..(1078)
ctccaacaagcatagcgcgccccggaccggccccccctttcccctccccctccgtgccgcctctgccgcgatgccccccgctgcgcccggggcccggctccggcttctcgccgccgccgccctggccggcttggccgtcatcagccgggggctgctctcccagaggctggagttcaactctcctgccgacaactacacagtgtgtgaaggtgacaacgccaccctcagctgcttcatggacgagcatgtgacccgcgtggcctggctgaaccgctccaacatcctgtacgccggcaacgaccgcaggaccagggacccgcgggtgcggctgctcatcaacacccccgaggagttctccatcctcgtcaccgaggtggggctcggcgacgagggcctctacacctgctccttccagacccgccaccagccgtacaccactcaggtctacctcattgtccacgtccctgcccgcgttgtgaacatctcgtcgcctgtgatggtgaatgagggaggtaatgtgaacctgctttgcctggccgtggggcggccagagcccacggtcacctggagacagctccgagacggcttcacctcggagggagagatcctggagatctctgacatcctgcggggccaggccggggagtatgagtgcgtgactcacaacggggttaactcggcgcccgacagccgccgcgtgctggtcacagtcaactatcctccgaccatcacggacgtgaccagcgcccgcaccgcgctggggccgggccgcctactgcgctgcgaagccatggcggtttcccccgcggatttccagtggtataaggatgacagactactgagcagcggcacggccgagggcctgaaggtgcagatggagcgcactcgctcgatgcttctctttgccaacatgagcgcccggcattacggcaactatacgtgttgcgccgccaaccggctgggagcgtccagcgcctccatgcggctcctgtgcccaggatccctggagaactcagccccgaggcccccagggcccctggccctcctctccgccctgggctggctgtggtggagaatgtaggcgcaacccagtggagctcgcctccccctgcagggggcctcaggccaagagtgagagaaaagggggagcaagagccctgggtctcgtg

SEQ ID NO: 304 - protein, 336 aa, Homo sapiens
MPPAAPGARLRLLAAAALAGLAVISRGLLSQRLEFNSPADNYTVCEGDNATLSCFMDEHVTRVAWLNRSNILYAGNDRRTRDPRVRLLINTPEEFSILVTEVGLGDEGLYTCSFQTRHQPYTTQVYLIVHVPARVVNISSPVMVNEGGNVNLLCLAVGRPEPTVTWRQLRDGFTSEGEILEISDILRGQAGEYECVTHNGVNSAPDSRRVLVTVNYPPTITDVTSARTALGPGRLLRCEAMAVSPADFQWYKDDRLLSSGTAEGLKVQMERTRSMLLFANMSARHYGNYTCCAANRLGASSASMRLLCPGSLENSAPRPPGPLALLSALGWLWWRM

SEQ ID NO: 305 - DNA, 946 bp, Homo sapiens; identical to SEQ ID NO: 289
  CDS (11)..(937)

SEQ ID NO: 306 - protein, 309 aa, Homo sapiens
LLSQSLEFNSPADNYTVCEGDNATLSCFIDEHVTRVAWLNRSNILYAGNDRWTSDPRVRLLINTPEEFSILITEVGLGDEGLYTCSFQTRHQPYTTQVYLIVHVPARIVNISSPVTVNEGGNVNLLCLAVGRPEPTVTWRQLRDGFTSEGEILEISDIQRGQAGEYECVTHNGVNSAPDSRRVLVTVNYPPTITDVTSARTALGRAALLRCEAMAVPPADFQWYKDDRLLSSGTAEGLKVQTERTRSMLLFANVSARHYGNYTCRAANRLGASSASMRLLRPGSLENSAPRPPGLLALLSALGWLWWRM

SEQ ID NO: 307 - DNA, 1033 bp, Homo sapiens; identical to SEQ ID NO: 283
  CDS (17)..(1024)

SEQ ID NO: 308 - protein, 336 aa, Homo sapiens
MPPPAPGARLRLLAAAALAGLAVISRGLLSQSLEFNSPADNYTVCEGDNATLSCFIDEHVTRVAWLNRSNILYAGNDRWTSDPRVRLLINTPEEFSILITEVGLGDEGLYTCSFQTRHQPYTTQVYLIVHVPARIVNISSPVTVNEGGNVNLLCLAVGRPEPTVTWRQLRDGFTSEGEILEISDIQRGQAGEYECVTHNGVNSAPDSRRVLVTVNYPPTITDVTSARTALGRAALLRCEAMAVPPADFQWYKDDRLLSSGTAEGLKVQTERTRSMLLFANVSARHYGNYTCRAANRLGASSASMRLLRPGSLENSAPRPPGLLALLSALGWLWWRM

SEQ ID NO: 309 - DNA, 1035 bp, Homo sapiens
  CDS (16)..(1023)
caccgcggccgcaccatgcccccccctgcgcccggggcccggctccggcttctcgccgccgccgccctggccggcttggccgtcatcagccgagggctgctctcccagagcctggagttcaactctcctgccgacaactacacagtgtgtgaaggtgacaacgccaccctcagctgcttcatcgacgagcacgtgacccgcgtggcctggctgaaccgctccaacatcctgtatgccggcaatgaccgctggaccagcgacccgcgggtgcggctgctcatcaacacccccgaggagttctccatcctcatcaccgaggtggggctcggcgacgagggcctctacacctgctccttccagacccgccaccagccgtacaccactcaggtctacctcattgtccacgtccctgcccgcattgtgaacatctcgtcgcctgtgacggtgaatgaggggggcaatgtgaacctgctttgcctggccgtggggcggccagagcccacggtcacctggagacagctccgagacggcttcacctcggagggagagatcctggagatctctgacatccagcggggccaggccggggagtatgagtgcgtgactcacaacggggttaactcggcgcccgacagccgccgcgtgctggtcacagtcaactatcctccgaccatcacggacgtgaccagcgcccgcaccgcgctgggccgggccgccctcctgcgctgcgaagccatggcggttccccccgcggatttccagtggtacaaggatgacagactgctgagcagcggcacggccgaaggcctgaaggtgcagacggagcgcacccgctcgatgcttctctttgccaacgtgagcgcccggcattacggcaactatacgtgtcgcgccgccaaccgactgggagcgtccagcgcctccatgcggctcctgcgcccaggatccctggagaactcagccccgaggcccccagggctcctggccctcctctccgccctgggctggctgtggtggagaatgtaggtcgacggc

SEQ ID NO: 310 - protein, 336 aa, Homo sapiens; identical to SEQ ID NO: 308

SEQ ID NO: 311 - DNA, 976 bp, Homo sapiens; identical to SEQ ID NO: 293
  CDS (11)..(970)

SEQ ID NO: 312 - protein, 320 aa, Homo sapiens
LAGLAVISRGLLSQSLEFNSPADNYTVCEGDNATLSCFIDEHVTRVAWLNRSNILYAGNDRWTSDPRVRLLINTPEEFSILITEVGLGDEGLYTCSFQTRHQPYTTQVYLIVHVPARIVNISSPVTVNEGGNVNLLCLAVGRPEPTVTWRQLRDGFTSEGEILEISDIQRGQAGEYECVTHNGVNSAPDSRRVLVTVNYPPTITDVTSARTALGRAALLRCEAMAVPPADFQWYKDDRLLSSGTAEGLKVQTERTRSMLLFANVSARHYGNYTCRAANRLGASSASMRLLRPGSLENSAPRPPGLLALLSALGWLWWRMV

SEQ ID NO: 313 - DNA, 1030 bp, Homo sapiens
  CDS (14)..(1021)
cacctcgcgaaccatgcccccccctgcgcccggggcccggctccggcttctcgccgccgccgccctggccggcttggccgtcatcagccgagggctgctctcccagagcctggagttcaactctcctgccgacaactacacagtgtgtgaaggtgacaacgccaccctcagctgcttcatcgacgagcacgtgacccgcgtggcctggctgaaccgctccaacatcctgtatgccggcaatgaccgctggaccagcgacccgcgggtgcggctgctcatcaacacccccgaggagttctccatcctcatcaccgaggtggggctcggcgacgagggcctctacacctgctccttccagacccgccaccagccgtacaccactcaggtctacctcattgtccacgtccctgcccgcattgtgaacatctcgtcgcctgtgacggtgaatgaggggggcaatgtgaacctgctttgcctggccgtggggcggccagagcccacggtcacctggagacagctccgagacggcttcacctcggagggagagatcctggagatctctgacatccagcggggccaggccggggagtatgagtgcgtgactcacaacggggttaactcggcgcccgacagccgccgcgtgctggtcacagtcaactatcctccgaccatcacggacgtgaccagcgcccgcaccgcgctgggccgggccgccctcctgcgctgcgaagccatggcggttccccccgcggatttccagtggtacaaggatgacagactgctgagcagcggcacggccgaaggcctgaaggtgcagacggagcgcacccgctcgatgcttctctttgccaacgtgagcgcccggcattacggcaactatacgtgtcgcgccgccaaccgactgggagcgtccagcgcctccatgcggctcctgcgcccaggatccctggagaactcagccccgaggcccccagggctcctggccctcctctccgccctgggctggctgtggtggagaatggtcgacggc

SEQ ID NO: 314 - protein, 336 aa, Homo sapiens; identical to SEQ ID NO: 308

SEQ ID NO: 315 - DNA, 1271 bp, Homo sapiens
  CDS (48)..(1055)
gcgcagtgtgctggaattcgcccttcctccgtgccgcctctgccgcgatgcccccccctgcgcccggggcccggctccggcttctcgccgccgccgccctggccggcttggccgtcatcagccgagggctgctctcccagagcctggagttcaactctcctgccgacaactacacagtgtgtgaaggtgacaacgccaccctcagctgcttcatcgacgagcacgtgacccgcgtggcctggctgaaccgctccaacatcctgtatgccggcaatgaccgctggaccagcgacccgcgggtgcggctgctcatcaacacccccgaggagttctccatcctcatcaccgaggtggggctcggcgacgagggcctctacacctgctccttccagacccgccaccagccgtacaccactcaggtctacctcattgtccacgtccctgcccgcattgtgaacatctcgtcgcctgtgatggtgaatgaggggggcaatgtgaacctgctttgcctggccgtggggcggccagagcccacggtcacctggagacagctccgagacggcttcacctcggagggagagatcctggagatctctgacatccagcggggccaggccggggagtatgagtgcgtgactcacaacggggttaactcggcgcccgacagccgccgcgtgctggtcacagtcaactatcctccgaccatcacggacgtgaccagcgcccgcaccgcgctgggccgggccgccctcctgcgctgcgaagccatggcggttccccccgcggatttccagtggtataaggatgacagactgctgagcagcggcacggccgaaggcctgaaggtgcagatggagcgcacccgctcgatgcttctctttgccaacatgagcgcccggcattacggcaactatacgtgttgcgccgccaaccgactgggagcgtccagcgcctccatgcggctcctgtgcccaggatccctggagaactcagccccgaggcccccagggctcctggccctcctctccgccctgggctggctgtggtggagaatgtaggcgcaacccagtggagctcgcctccccctgcagggggcctcaggccaagagtgagagaaaagggggagcaagagccctgggtctcgtgggggcagaagggctctcggccaccaaggaagaagagaagaggagaaagaggaggaggcagaggaagaaagatctttagagaacccatcactgtgagggataacgcaaaattatgcatctttctac

SEQ ID NO: 316 - protein, 336 aa, Homo sapiens
MPPPAPGARLRLLAAAALAGLAVISRGLLSQSLEFNSPADNYTVCEGDNATLSCFIDEHVTRVAWLNRSNILYAGNDRWTSDPRVRLLINTPEEFSILITEVGLGDEGLYTCSFQTRHQPYTTQVYLIVHVPARIVNISSPVMVNEGGNVNLLCLAVGRPEPTVTWRQLRDGFTSEGEILEISDIQRGQAGEYECVTHNGVNSAPDSRRVLVTVNYPPTITDVTSARTALGRAALLRCEAMAVPPADFQWYKDDRLLSSGTAEGLKVQMERTRSMLLFANMSARHYGNYTCCAANRLGASSASMRLLCPGSLENSAPRPPGLLALLSALGWLWWRM

SEQ ID NO: 317 - DNA, 1271 bp, Homo sapiens
  CDS (48)..(1055)
gcgcagtgtgctggaattcgcccttcctccgtgccgcctctgccgcgatgcccccccctgcgcccggggcccggctccggcttctcgccgccgccgccctggccggcttggccgtcatcagccgagggctgctctcccagagcctggagttcaactctcctgccgacaactacacagtgtgtgaaggtgacaacgccaccctcagctgcttcatcgacgagcacgtgacccgcgtggcctggctgaaccgctccaacatcctgtatgccggcaatgaccgctggaccagcgacccgcgggtgcggctgctcatcaacacccccgaggagttctccatcctcatcaccgaggtggggctcggcgacgagggcctctacacctgctccttccagacccgccaccagccgtacaccactcaggtctacctcattgtccacgtccctgcccgcattgtgaacatctcgtcgcctgtgatggtgaatgaggggggcaatgtgaacctgctttgcctggccgtggggcggccagagcccacggtcacctggagacagctccgagacggcttcacctcggagggagagatcctggagatctctgacatccagcggggccaggccggggagtatgagtgcgtgactcacaacggggttaactcggcgcccgacagccgccgcgtgctggtcacagtcaactatcctccgaccatcacggacgtgaccagcgcccgcaccgcgctgggccgggccgccctcctgcgctgcgaagccatggcggttccccccgcggatttccagtggtataaggatgacagactgctgagcagcggcacggccgaaggcctgaaggtgcagatggagcgcacccgctcgatgcttctctttgccaacgtgagcgcccggcattacggcaactatacgtgttgcgccgccaaccgactgggggcgtccagcgcctccatgcggctcctgtgcccaggatccctggagaactcagccccgaggcccccagggctcctggccctcctctccgccctgggctggctgtggtggagaatgtaggcgcaacccagtggagctcgcctccccctgcagggggcctcaggccaagagtgagagaaaagggggagcaagagccctgggtctcgtgggggcagaagggctctcggccaccaaggaagaagagaagaggagaaagaggaggaggcagaggaagaaagatctttagagaacccatcactgtgagggataacgcaaaattatgcatctttctac

SEQ ID NO: 318 - protein, 336 aa, Homo sapiens; identical to SEQ ID NO: 282

SEQ ID NO: 319 - DNA, 3212 bp, Homo sapiens
  CDS (1)..(2271)
atgctgagcctcctcgtctggatcctcactctctccgatactttctcccaagggacccagacccgcttcagccaggagccagctgaccagacggtggtggctggacagcgggccgtgctcccctgtgtgctgctcaactactctggaattgtgcaatggaccaaggacgggctggccctgggcatgggccagggcctcaaagcctggccacggtaccgggttgtgggctccgcagacgctgggcagtacaacctggagatcacagatgctgagctctctgacgacgcctcttacgagtgccaggccacggaggccgccctgcgctctcggcgggccaaactcaccgtgctcatccccccagaggacaccaggattgacggaggccctgtgattctactgcaggcaggcaccccccacaacctcacatgccgggccttcaatgcgaagcctgctgccaccatcatctggttccgggacgggacgcagcaggagggcgctgtggccagcacggaattgctgaaggatgggaagagggagaccaccgtgagccaactgcttattaaccccacggacctggacatagggcgtgtcttcacttgccgaagcatgaacgaagccatccctagtggcaaggagacttccatcgagctggatgtgcaccaccctcctacagtgaccctgtccattgagccacagacggtgcaggagggtgagcgtgttgtctttacctgccaggccacagccaaccccgagatcttgggctacaggtgggccaaagggggtttcttgattgaagacgcccacgagagtcgctatgagacaaatgtggattattcctttttcacggagcctgtgtcttgtgaggttcacaacaaagtgggaagcaccaatgtcagcactttagtaaatgtccactttgctccccggattgtagttgaccccaaacccacaaccacagacattggctctgatgtgacccttacctgtgtctgggttgggaatccccccctcactctcacctggaccaaaaaggactcaaatatggtcctgagtaacagcaaccagctgctgctgaagtcggtgactcaggcagacgctggcacctacacctgccgggccatcgtgcctcgaatcggagtggctgagcgggaggtgccgctctatgtgaacgggccccccatcatctccagtgaggcagtgcagtatgctgtgaggggtgacggtggcaaggtggagtgtttcattgggagcacaccacccccagaccgcatagcatgggcctggaaggagaacttcttggaggtggggaccctggaacgctatacagtggagaggaccaactcaggcagtggggtgctatccacgctcaccatcaacaatgtcatggaggccgactttcagactcactacaactgcaccgcctggaacagcttcgggccaggcacagccatcatccagctggaagagcgagaggtgttacctgtgggcatcatagctggggccaccatcggcgcgagcatcctgctcatcttcttcttcatcgccttggtattcttcctctaccggcgccgcaaaggcagtcgcaaagacgtgaccctgaggaagctggatatcaaggtggagacagtgaaccgagagccacttacgatgcattctgaccgggaggatgacaccgccagcgtctccacagcaacccgggtcatgaaggccatctactcgtcgtttaaggatgatgtggatctgaagcaggacctgcgctgcgacaccatcgacacccgggaggagtatgagatgaaggaccccaccaatggctactacaacgtgcgtgcccatgaagaccgcccgtcttccagggcagtgctctatgctgactaccgtgcccctggccctgcccgcttcgacggccgcccctcatcccgtctctcccactccagcggctatgcccagctcaacacctatagccggggccctgcctctgactatggccctgagcccacaccccctggccctgctgccccagctggcactgacacaaccagccagctgtcctacgagaactatgagaagttcaactcccatcccttccctggggcagctgggtaccccacctaccgactgggctacccccaggccccaccctctggcctggagcggaccccatatgaggcgtatgaccccattggcaagtacgccacagccactcgattctcctacacctcccagcactcggactacggccagcgattccagcagcgcatgcagactcacgtgtaggggccagagcctggctggggcatctctgcggggcagaggagaaggctttcgcagctgttccctgatattcagggacattgctcattgctcccttctcggaccagccttcttcctcccaccatggcaggtggggagcaggtctcccagagacaccccgtcccgaggatggtgctctgtgcatgccccagcctcctgggcctgcccttccctcttcttcgggaggatgtgtctcttctgacctgcactcttgcctgaccctagaatggggacagggaaagtgaaggttagggaaagcagaggggggcactttttagcattccctttctatcccacccctctgatctcccataagtggaaatgggggtacccagggatgggcaggctttggcctagggacatgaagtatgggagtgggtggctgtggcacagacaggtggaaaacgggatagcctggccagtccctctgttgtctgcattcgtgccctgggtgcctctctccttcctcagggtactgcagaagggagcgaacagggtactgttcgctcttgtctacagaacagccctggcactgcattcaaatccagtcttcattcagctgggatcaaaatgccagtcaccttggctacccactgtggacagctgtctgtcagcatgcagagggatccaggaatccccccggcagcacggcccgctttccttctcctccatgctgggccagccagataagtcagggtcctggtggagaaagaaaggctaggaccatgtcctcattgacccagatactgctgtgtgctgcacagcagtgaaccaacactagagggagccacacaagcctcctctccccagtctgccccacttcctggctttaactcttgagctggtttggggagtggtgaggtaggggtgggggtgctgtaggctctttttcaaaaaaaaac

SEQ ID NO: 320 - protein, 757 aa, Homo sapiens
MLSLLVWILTLSDTFSQGTQTRFSQEPADQTVVAGQRAVLPCVLLNYSGIVQWTKDGLALGMGQGLKAWPRYRVVGSADAGQYNLEITDAELSDDASYECQATEAALRSRRAKLTVLIPPEDTRIDGGPVILLQAGTPHNLTCRAFNAKPAATIIWFRDGTQQEGAVASTELLKDGKRETTVSQLLINPTDLDIGRVFTCRSMNEAIPSGKETSIELDVHHPPTVTLSIEPQTVQEGERVVFTCQATANPEILGYRWAKGGFLIEDAHESRYETNVDYSFFTEPVSCEVHNKVGSTNVSTLVNVHFAPRIVVDPKPTTTDIGSDVTLTCVWVGNPPLTLTWTKKDSNMVLSNSNQLLLKSVTQADAGTYTCRAIVPRIGVAEREVPLYVNGPPIISSEAVQYAVRGDGGKVECFIGSTPPPDRIAWAWKENFLEVGTLERYTVERTNSGSGVLSTLTINNVMEADFQTHYNCTAWNSFGPGTAIIQLEEREVLPVGIIAGATIGASILLIFFFIALVFFLYRRRKGSRKDVTLRKLDIKVETVNREPLTMHSDREDDTASVSTATRVMKAIYSSFKDDVDLKQDLRCDTIDTREEYEMKDPTNGYYNVRAHEDRPSSRAVLYADYRAPGPARFDGRPSSRLSHSSGYAQLNTYSRGPASDYGPEPTPPGPAAPAGTDTTSQLSYENYEKFNSHPFPGAAGYPTYRLGYPQAPPSGLERTPYEAYDPIGKYATATRFSYTSQHSDYGQRFQQRMQTHV

SEQ ID NO: 321 - DNA, 3430 bp, Homo sapiens
  CDS (351)..(2489)
ctctccgatactttctcccaagggtcagctgcttcttcattccaagtggacaaggagccagctgctcactgtccttgagagacttcagcgagagaccagggtgtccaggctccatgcaggaaagccatgcgtataaattccacctctgagccaggcctcaccagcaagcccactcttaagcccttgacttgggctccaggggccatgggaaggagaaacggacccagacccgcttcagccaggagccagctgaccagacggtggtggctggacagcgggccgtgctcccctgtgtgctgctcaactactctggaattgtgcaatggaccaaggacgggctggccctgggcatgggccaggccctcaaagcctggccacggtaccgggttgtgggctccgcagacgctgggcagtacaacctggagatcacagatgctgagctctctgacgacgcctcttacgagtgccaggccacggaggccgccctgcgctctcggcgggccaaactcaccgtgctcatccccccagaggacaccaggattgacggaggccctgtgattctactgcaggcaggcaccccccacaacctcacatgccgggccttcaatgcgaagcctgctgccaccatcatctggttccgggacgggacgcagcaggagggcgctgtggccagcacggaattgctgaaggatgggaagagggagaccaccgtgagccaactgcttattaaccccacggacctggacatagggcgtgtcttcacttgccgaagcatgaacgaagccatccctagtggcaaggagacttccatcgagctggatgtgcaccaccctcctacagtgaccctgtccattgagccacagacggtgcaggagggtgagcgtgttgtctttacctgccaggccacagccaaccccgagatcttgggctacaggtgggccaaagggggtttcttgattgaagacgcccacgagagtcgctatgagacaaatgtggattattcctttttcacggagcctgtgtcttgtgaggttcacaacaaagtgggaagcaccaatgtcagcactttagtaaatgtccactttgctccccggattgtagttgaccccaaacccacaaccacagacattggctctgatgtgacccttacctgtgtctgggttggggaaatccccccctcactctcacctggaccaaaaaggactcaaatattggggccctggcttcttggttccccacccgaggctgctctctctgcccaggtcctgagtaacagcaaccagctgctgctgaagtcggtgactcaggcagacgctggcacctacacctgccgggccatcgtgcctcgaatcggagtggctgagcgggaggtgccgctctatgtgaacgggccccccatcatctccagtgaggcagtgcagtatgctgtgaggggtgacggtggcaaggtggagtgtttcattgggagcacaccacccccagaccgcatagcatgggcctggaaggagaacttcttggaggtggggaccctggaacgctatacagtggagaggaccaactcaggcagtggggtgctatccacgctcaccatcaacaatgtcatggaggccgactttcagactcactacaactgcaccgcctggaacagcttcgggccaggcacagccatcatccagctggaagagcgagaggtgttacctgtgggcatcatagctggggccaccatcggcgcgagcatcctgctcatcttcttcttcatcgccttggtattcttcctctaccggcgccgcaaaggcagtcgcaaagacgtgaccctgaggaagctggatatcaaggtggagacagtgaaccgagagccacttacgatgcattctgaccgggaggatgacaccgccagcgtctccacagcaacccgggtcatgaaggccatctactcgtcgtttaaggatgatgtggatctgaagcaggacctgcgctgcgacaccatcgacacccgggaggagtatgagatgaaggaccccaccaatggctactacaacgtgcgtgcccatgaagaccgcccgtcttccagggcagtgctctatgctgactaccgtgcccctggccctgcccgcttcgacggccgcccctcatcccgtctctcccactccagcggctatgcccagctcaacacctatagccggggccctgcctctgactatggccctgagcccacaccccctggccctgctgccccagctggcactgacacaaccagccagctgtcctacgagaactatgagaagttcaactcccatcccttccctggggcagctgggtaccccacctaccgactgggctacccccaggccccaccctctggcctggagcggaccccatatgaggcgtatgaccccattggcaagtacgccacagccactcgattctcctacacctcccagcactcggactacggccagcgattccagcagcgcatgcagactcacgtgtaggggccagagcctggctggggcatctctgcggggcagaggagaaggctttcgcagctgttccctgatattcagggacattgctcattgctcccttctcggaccagccttcttcctcccaccatggcaggtggggagcaggtctcccagagacaccccgtcccgaggatggtgctctgtgcatgccccagcctcctgggcctgcccttccctcttcttcgggaggatgtgtctcttctgacctgcactcttgcctgaccctagaatggggacagggaaagtgaaggttagggaaagcagaggggggcactttttagcattccctttctatcccacccctctgatctcccataagtggaaatgggggtacccagggatgggcaggctttggcctagggacatgaagtatgggagtgggtggctgtggcacagacaggtggaaaacgggatagcctggccagtccctctgttgtctgcattcgtgccctgggtgcctctctccttcctcagggtactgcagaagggagcgaacagggtactgttcgctcttgtctacagaacagccctggcactgcattcaaatccagtcttcattcagctgggatcaaaatgccagtcaccttggctacccactgtggacagctgtctgtcagcatgcagagggatccaggaatccccccggcagcacggcccgctttccttctcctccatgctgggccagccagataagtcagggtcctggtggagaaagaaaggctaggaccatgtcctcattgacccagatactgctgtgtgctgcacagcagtgaaccaacactagagggagccacacaagcctcctctccccagtctgccccacttcctggctttaactcttgagctggtttggggagtggtgaggtaggggtgggggtgctgtaggctctttttcaaaaaaaaac

SEQ ID NO: 322 - protein, 713 aa, Homo sapiens
MGQALKAWPRYRVVGSADAGQYNLEITDAELSDDASYECQATEAALRSRRAKLTVLIPPEDTRIDGGPVILLQAGTPHNLTCRAFNAKPAATIIWFRDGTQQEGAVASTELLKDGKRETTVSQLLINPTDLDIGRVFTCRSMNEAIPSGKETSIELDVHHPPTVTLSIEPQTVQEGERVVFTCQATANPEILGYRWAKGGFLIEDAHESRYETNVDYSFFTEPVSCEVHNKVGSTNVSTLVNVHFAPRIVVDPKPTTTDIGSDVTLTCVWVGEIPPSLSPGPKRTQILGPWLLGSPPEAALSAQVLSNSNQLLLKSVTQADAGTYTCRAIVPRIGVAEREVPLYVNGPPIISSEAVQYAVRGDGGKVECFIGSTPPPDRIAWAWKENFLEVGTLERYTVERTNSGSGVLSTLTINNVMEADFQTHYNCTAWNSFGPGTAIIQLEEREVLPVGIIAGATIGASILLIFFFIALVFFLYRRRKGSRKDVTLRKLDIKVETVNREPLTMHSDREDDTASVSTATRVMKAIYSSFKDDVDLKQDLRCDTIDTREEYEMKDPTNGYYNVRAHEDRPSSRAVLYADYRAPGPARFDGRPSSRLSHSSGYAQLNTYSRGPASDYGPEPTPPGPAAPAGTDTTSQLSYENYEKFNSHPFPGAAGYPTYRLGYPQAPPSGLERTPYEAYDPIGKYATATRFSYTSQHSDYGQRFQQRMQTHV

SEQ ID NO: 323 - DNA, 2128 bp, Homo sapiens
  CDS (31)..(2118)
caatggaccaaggacgggctggccctgggcatgggccagggcctcaaagcctggccacggtaccgggttgtgggctccgcagacgctgggcagtacaacctggagatcacagatgctgagctctctgacgacgcctcttacgagtgccaggccacggaggccgccctgcgctctcggcgggccaaactcaccgtgctcatccccccagaggacaccaggattgacggaggccctgtgattctactgcaggcaggcaccccccacaacctcacatgccgggccttcaatgcgaagcctgctgccaccatcatctggttccgggacgggacgcagcaggagggcgctgtggccagcacggaattgctgaaggatgggaagagggagaccaccgtgagccaactgcttattaaccccacggacctggacatagggcgtgtcttcacttgccgaagcatgaacgaagccatccctagtggcaaggagacttccatcgagctggatgtgcaccaccctcctacagtgaccctgtccattgagccacagacggtgcaggagggtgagcgtgttgtctttacctgccaggccacagccaaccccgagatcttggactacaggtgggccaaagggggtttcttgattgaagacgcccacgagagtcgctatgagacaaatgtggattattcctttttcacggagcctgtgtcttgtgaggttcacaacaaagtgggaagcaccaatgtcagcactttagtaaatgtccactttgctccccggattgtagttgaccccaaacccacaaccacagacattggctctgatgtgacccttacctgtgtctgggttgggaatccccccctcactctcacctggaccaaaaaggactcaaatatggtcctgagtaacagcaaccagctgctgctgaagtcggtgactcaggcagacgctggcacctacacctgccgggccatcgtgcctcgaatcggagtggctgagcgggaggtgccgctctatgtgaacgggccccccatcatctccagtgaggcagtgcagtatgctgtgaggggtgacggtggcaaggtggagtgtttcattgggagcacaccacccccagaccgcatagcatgggcctggaaggagaacttcttggaggtggggaccctggaacgctatacagtggagaggaccaactcaggcagtggggtgctatccacgctcaccatcaacaatgtcatggaggccgactttcagactcactacaactgcaccgcctggaacagcttcgggccaggcacagccatcatccagctggaagagcgagaggtgttacctgtgggcatcatagctggggccaccatcggcgcgagcatcctgctcatcttcttcttcatcgccttggtattcttcctctaccggcgccgcaaaggcagtcgcaaagacgtgaccctgaggaagctggatatcaaggtggagacagtgaaccgagagccacttacgatgcattctgaccgggaggatgacaccgccagcgtctccacagcaacccgggtcatgaaggccatctactcgtcgtttatggatgatgtggatctgaagcaggacctgcgctgcgacaccatcgacacccgggaggagtatgagatgaaggaccccaccaatggctactacaacgtgcgtgcccatgaagaccgcccgtcttccagggcagtgctctatgctgactaccgtgcccctggccctgcccgcttcgacggccgcccctcatcccgtctctcccactccagcggctatgcccagctcaacacctatagccggggccctgcctctgactatggccctgagcccacaccccctggccctgctgccccagctggcactgacacaaccagccagctgtcctacgagaactatgagaagttcaactcccatcccttccctggggcagctgggtaccccacctaccgactgggctacccccaggccccaccctctggcctggagcggaccccatatgaggcgtatgaccccattggcaagtacgccacagccactcgattctcctacacctcccagcactcggactacggccagcgattccagcagcgcatgcagactcacgtgtaggggccag

SEQ ID NO: 324 - protein, 696 aa, Homo sapiens
MGQGLKAWPRYRVVGSADAGQYNLEITDAELSDDASYECQATEAALRSRRAKLTVLIPPEDTRIDGGPVILLQAGTPHNLTCRAFNAKPAATIIWFRDGTQQEGAVASTELLKDGKRETTVSQLLINPTDLDIGRVFTCRSMNEAIPSGKETSIELDVHHPPTVTLSIEPQTVQEGERVVFTCQATANPEILDYRWAKGGFLIEDAHESRYETNVDYSFFTEPVSCEVHNKVGSTNVSTLVNVHFAPRIVVDPKPTTTDIGSDVTLTCVWVGNPPLTLTWTKKDSNMVLSNSNQLLLKSVTQADAGTYTCRAIVPRIGVAEREVPLYVNGPPIISSEAVQYAVRGDGGKVECFIGSTPPPDRIAWAWKENFLEVGTLERYTVERTNSGSGVLSTLTINNVMEADFQTHYNCTAWNSFGPGTAIIQLEEREVLPVGIIAGATIGASILLIFFFIALVFFLYRRRKGSRKDVTLRKLDIKVETVNREPLTMHSDREDDTASVSTATRVMKAIYSSFMDDVDLKQDLRCDTIDTREEYEMKDPTNGYYNVRAHEDRPSSRAVLYADYRAPGPARFDGRPSSRLSHSSGYAQLNTYSRGPASDYGPEPTPPGPAAPAGTDTTSQLSYENYEKFNSHPFPGAAGYPTYRLGYPQAPPSGLERTPYEAYDPIGKYATATRFSYTSQHSDYGQRFQQRMQTHV

SEQ ID NO: 325 - DNA, 2100 bp, Homo sapiens
  CDS (1)..(2100)
ggatccatgggccagggcctcaaagcctggccacggtaccgggttgtgggctccgcagacgctgggcagtacaacctggagatcacagatgctgagctctctgacgacgcctcttacgagtgccaggccacggaggccgccctgcgctctcggcgggccaaactcaccgtgctcatccccccagaggacaccaggattgacggaggccctgtgattctactgcaggcaggcaccccccacaacctcacatgccgggccttcaatgcgaagcctgctgccaccatcatctggttccgggacgggacgcagcaggagggcgctgtggccagcacggaattgctgaaggatgggaagagggagaccaccgtgagccaactgcttattaaccccacggacctggacatagggcgtgtcttcacttgccgaagcatgaacgaagccatccctagtggcaaggagacttccatcgagctggatgtgcaccaccctcctacagtgaccctgtccattgagccacagacggtgcaggagggtgagcgtgttgtctttacctgccaggccacagccaaccccgagatcttggactacaggtgggccaaagggggtttcttgattgaagacgcccacgagagtcgctatgagacaaatgtggattattcctttttcacggagcctgtgtcttgtgaggttcacaacaaagtgggaagcaccaatgtcagcactttagtaaatgtccactttgctccccggattgtagttgaccccaaacccacaaccacagacattggctctgatgtgacccttacctgtgtctgggttgggaatccccccctcactctcacctggaccaaaaaggactcaaatatggtcctgagtaacagcaaccagctgctgctgaagtcggtgactcaggcagacgctggcacctacacctgccgggccatcgtgcctcgaatcggagtggctgagcgggaggtgccgctctatgtgaacgggccccccatcatctccagtgaggcagtgcagtatgctgtgaggggtgacggtggcaaggtggagtgtttcattgggagcacaccacccccagaccgcatagcatgggcctggaaggagaacttcttggaggtggggaccctggaacgctatacagtggagaggaccaactcaggcagtggggtgctatccacgctcaccatcaacaatgtcatggaggccgactttcagactcactacaactgcaccgcctggaacagcttcgggccaggcacagccatcatccagctggaagagcgagaggtgttacctgtgggcatcatagctggggccaccatcggcgcgagcatcctgctcatcttcttcttcatcgccttggtattcttcctctaccggcgccgcaaaggcagtcgcaaagacgtgaccctgaggaagctggatatcaaggtggagacagtgaaccgagagccacttacgatgcattctgaccgggaggatgacaccgccagcgtctccacagcaacccgggtcatgaaggccatctactcgtcgtttatggatgatgtggatctgaagcaggacctgcgctgcgacaccatcgacacccgggaggagtatgagatgaaggaccccaccaatggctactacaacgtgcgtgcccatgaagaccgcccgtcttccagggcagtgctctatgctgactaccgtgcccctggccctgcccgcttcgacggccgcccctcatcccgtctctcccactccagcggctatgcccagctcaacacctatagccggggccctgcctctgactatggccctgagcccacaccccctggccctgctgccccagctggcactgacacaaccagccagctgtcctacgagaactatgagaagttcaactcccatcccttccctggggcagctgggtaccccacctaccgactgggctacccccaggccccaccctctggcctggagcggaccccatatgaggcgtatgaccccattggcaagtacgccacagccactcgattctcctacacctcccagcactcggactacggccagcgattccagcagcgcatgcagactcacgtgctcgag

SEQ ID NO: 326 - protein, 700 aa, Homo sapiens
GSMGQGLKAWPRYRVVGSADAGQYNLEITDAELSDDASYECQATEAALRSRRAKLTVLIPPEDTRIDGGPVILLQAGTPHNLTCRAFNAKPAATIIWFRDGTQQEGAVASTELLKDGKRETTVSQLLINPTDLDIGRVFTCRSMNEAIPSGKETSIELDVHHPPTVTLSIEPQTVQEGERVVFTCQATANPEILDYRWAKGGFLIEDAHESRYETNVDYSFFTEPVSCEVHNKVGSTNVSTLVNVHFAPRIVVDPKPTTTDIGSDVTLTCVWVGNPPLTLTWTKKDSNMVLSNSNQLLLKSVTQADAGTYTCRAIVPRIGVAEREVPLYVNGPPIISSEAVQYAVRGDGGKVECFIGSTPPPDRIAWAWKENFLEVGTLERYTVERTNSGSGVLSTLTINNVMEADFQTHYNCTAWNSFGPGTAIIQLEEREVLPVGIIAGATIGASILLIFFFIALVFFLYRRRKGSRKDVTLRKLDIKVETVNREPLTMHSDREDDTASVSTATRVMKAIYSSFMDDVDLKQDLRCDTIDTREEYEMKDPTNGYYNVRAHEDRPSSRAVLYADYRAPGPARFDGRPSSRLSHSSGYAQLNTYSRGPASDYGPEPTPPGPAAPAGTDTTSQLSYENYEKFNSHPFPGAAGYPTYRLGYPQAPPSGLERTPYEAYDPIGKYATATRFSYTSQHSDYGQRFQQRMQTHVLE

SEQ ID NO: 327 - DNA, 2290 bp, Homo sapiens
  CDS (2)..(2290)
caccaagcttatgctgagcctcctcgtctggatcctcactctctccgatactttctcccaagggacccagacccgcttcagccaggagccagctgaccagacggtggtggctggacagcgggccgtgctcccctgtgtgctgctcaactactctggaattgtgcaatggaccaaggacgggctggccctgggcatgggccagggcctcaaagcctggccacggtaccgggttgtgggctccgcagacgctgggcagtacaacctggagatcacagatgctgagctctctgacgacgcctcttacgagtgccaggccacggaggccgccctgcgctctcggcgggccaaactcaccgtgctcatccccccagaggacaccaggattgacggaggccctgtgattctactgcaggcaggcaccccccacaacctcacatgccgggccttcaatgcgaagcctgctgccaccatcatctggttccgggacgggacgcagcaggagggcgctgtggccagcacggaattgctgaaggatgggaagagggagaccaccgtgagccaactgcttattaaccccacggacctggacatagggcgtgtcttcacttgccgaagcatgaacgaagccatccctagtggcaaggagacttccatcgagctggatgtgcaccaccctcctacagtgaccctgtccattgagccacagacggtgcaggagggtgagcgtgttgtctttacctgccaggccacagccaacccggagatcttgggctacaggtgggccaaagggggtttcttgattgaagacgcccacgagagtcgctatgagacaaatgtggattattcctttttcacggagcctgtgtcttgtgaggtccacaacaaagtgggaagcaccaatgtcagcactttagtaaatgtccactttgctccccggattgtagttgaccccaaacccacaaccacagacattggctctgatgtgacccttacctgtgtctgggttgggaatccccccctcactctcacctggaccaaaaaggactcaaatatggtcctgagtaacagcaaccagctgctgctgaagtcggtgactcaggcagacgctggcacctacacctgccgggccatcgtgcctcgaatcggagtggctgagcgggaggtgccgctctatgtgaacgggccccccatcatctccagtgaggcagtgcagtatgctgtgaggggtgacggtggcaaggtggagtgtttcattgggagcacaccacccccagaccgcatagcatgggcctggaaggagaacttcttggaggtggggaccctggaacgctatacagtggagaggaccaactcaggcagtggggtgctatccacgctcaccatcaacaatgtcatggaggccgactttcagactcactacaactgcaccgcctggaacagcttcgggccaggcacagccatcatccagctggaagagcgagaggtgttacctgtgggcatcatagctggggccaccatcggcgcgagcatcctgctcatcttcttcttcatcgccttggtattcttcctctaccggcgccgcaaaggcagtcgcaaagacgtgaccctgaggaagctggatatcaaggtggagacagtgaaccgagagccacttacgatgcattctgaccgggaggatgacaccgccagcgtctccacagcaacccgggtcatgaaggccatctactcgtcgtttaaggatgatgtggatctgaagcaggacctgcgctgcgacaccatcgacacccgggaggagtatgagatgaaggaccccaccaatggctactacaacgtgcgtgcccatgaagaccgcccgtcttccagggcagtgctctatgctgactaccgtgcccctggccctgcccgcttcgacggccgcccctcatcccgtctctcccactccagcggctatgcccagctcaacacctatagccggggccctgcctctgactatggccctgagcccacaccccctggccctgctgccccagctggcactgacacaaccagccagctgtcctacgagaactatgagaagttcaactcccatcccttccctggggcagctgggtaccccacctaccgactgggctacccccaggccccaccctctggcctggagcggaccccatatgaggcgtatgaccccattggcaagtacgccacagccactcgattctcctacacctcccagcactcggactacggccagcgattccagcagcgcatgcagactcacgtggtcgacggc

SEQ ID NO: 328 - protein, 763 aa, Homo sapiens
TKLMLSLLVWILTLSDTFSQGTQTRFSQEPADQTVVAGQRAVLPCVLLNYSGIVQWTKDGLALGMGQGLKAWPRYRVVGSADAGQYNLEITDAELSDDASYECQATEAALRSRRAKLTVLIPPEDTRIDGGPVILLQAGTPHNLTCRAFNAKPAATIIWFRDGTQQEGAVASTELLKDGKRETTVSQLLINPTDLDIGRVFTCRSMNEAIPSGKETSIELDVHHPPTVTLSIEPQTVQEGERVVFTCQATANPEILGYRWAKGGFLIEDAHESRYETNVDYSFFTEPVSCEVHNKVGSTNVSTLVNVHFAPRIVVDPKPTTTDIGSDVTLTCVWVGNPPLTLTWTKKDSNMVLSNSNQLLLKSVTQADAGTYTCRAIVPRIGVAEREVPLYVNGPPIISSEAVQYAVRGDGGKVECFIGSTPPPDRIAWAWKENFLEVGTLERYTVERTNSGSGVLSTLTINNVMEADFQTHYNCTAWNSFGPGTAIIQLEEREVLPVGIIAGATIGASILLIFFFIALVFFLYRRRKGSRKDVTLRKLDIKVETVNREPLTMHSDREDDTASVSTATRVMKAIYSSFKDDVDLKQDLRCDTIDTREEYEMKDPTNGYYNVRAHEDRPSSRAVLYADYRAPGPARFDGRPSSRLSHSSGYAQLNTYSRGPASDYGPEPTPPGPAAPAGTDTTSQLSYENYEKFNSHPFPGAAGYPTYRLGYPQAPPSGLERTPYEAYDPIGKYATATRFSYTSQHSDYGQRFQQRMQTHVVDG

SEQ ID NO: 329 - DNA, 2336 bp, Homo sapiens
  CDS (2)..(2335)
caccaagcttatgctgagcctcctcgtctggatcctcactctctccgatactttctcccaagggacccagacccgcttcagccaggagccagctgaccagacggtggtggctggacagcgggccgtgctcccctgtgtgctgctcaactactctggaattgtgcaatggaccaaggacgggctggccctgggcatgggccagggcctcaaagcctggccacggtaccgggttgtgggctccgcagacgctgggcagtacaacctggagatcacagatgctgagctctctgacgacgcctcttacgagtgccaggccacggaggccgccctgcgctctcggcgggccaaactcaccgtgctcatccccccagaggacaccaggattgacggaggccctgtgattctactgcaggcaggcaccccccacaacctcacatgccgggccttcaatgcgaagcctgctgccaccatcatctggttccgggacgggacgcagcaggagggcgctgtggccagcacggaattgctgaaggatgggaagagggagaccaccgtgagccaactgcttattaaccccacggacctggacatagggcgtgtcttcacttgccgaagcatgaacgaagccatccctagtggcaaggagacttccatcgagctggatgtgcaccaccctcctacagtgaccctgtccattgagccacagacggtgcaggagggtgagcgtgttgtctttacctgccaggccacagccaaccccgagatcttgggctacaggtgggccaaagggggtttcttgattgaagacgcccacgagagtcgctatgagacaaatgtggattattcctttttcacggagcctgtgtcttgtgaggttcacaacaaagtgggaagcaccaatgtcagcactttagtaaatgtccactttgctccccggattgtagttgaccccaaacccacaaccacagacattggctctgatgtgacccttacctgtgtctgggttgggaatccccccctcactctcacctggaccaaaaaggactcaaatatggggcccaggcctcctggctccccacccgaggctgctctctctgcccaggtcctgagtaacagcaaccagctgctgctgaagtcggtgactcaggcagacgctggcacctacacctgccgggccatcgtgcctcgaatcggagtggctgagcgggaggtgccgctctatgtgaacgggccccccatcatctccagtgaggcagtgcagtatgctgtgaggggtgacggtggcaaggtggagtgtttcattgggagcacaccacccccagaccgcatagcatgggcctggaaggagaacttcttggaggtggggaccctggaacgctatacagtggagaggaccaactcaggcagtggggtgctatccacgctcaccatcaacaatgtcatggaggccgactttcagactcactacaactgcaccgcctggaacagcttcgggccaggcacagccatcatccagctggaagagcgagaggtgttacctgtgggcatcatagctggggccaccatcggcgcgagcatcctgctcatcttcttcttcatcgccttggtattcttcctctaccggcgccgcaaaggcagtcgcaaagacgtgaccctgaggaagctggatatcaaggtggagacagtgaaccgagagccacttacgatgcattctgaccgggaggatgacaccgccagcgtctccacagcaacccgggtcatgaaggccatctactcgtcgtttaaggatgatgtggatctgaagcaggacctgcgctgcgacaccatcgacacccgggaggagtatgagatgaaggaccccaccaatggctactacaacgtgcgtgcccatgaagaccgcccgtcttccagggcagtgctctatgctgactaccgtgcccctggccctgcccgcttcgacggccgcccctcatcccgtctctcccactccagcggctatgcccagctcaacacctatagccggggccctgcctctgactatggccctgagcccacaccccctggccctgctgccccagctggcactgacacaaccagccagctgtcctacgagaactatgagaagttcaactcccatcccttccctggggcagctgggtaccccacctaccgactgggctacccccaggccccaccctctggcctggagcggaccccatatgaggcgtatgaccccattggcaagtacgccacagccactcgattctcctacacctcccagcactcggactacggccagcgattccagcagcgcatgcagactcacgtggtcgacg

SEQ ID NO: 330 - protein, 778 aa, Homo sapiens
TKLMLSLLVWILTLSDTFSQGTQTRFSQEPADQTVVAGQRAVLPCVLLNYSGIVQWTKDGLALGMGQGLKAWPRYRVVGSADAGQYNLEITDAELSDDASYECQATEAALRSRRAKLTVLIPPEDTRIDGGPVILLQAGTPHNLTCRAFNAKPAATIIWFRDGTQQEGAVASTELLKDGKRETTVSQLLINPTDLDIGRVFTCRSMNEAIPSGKETSIELDVHHPPTVTLSIEPQTVQEGERVVFTCQATANPEILGYRWAKGGFLIEDAHESRYETNVDYSFFTEPVSCEVHNKVGSTNVSTLVNVHFAPRIVVDPKPTTTDIGSDVTLTCVWVGNPPLTLTWTKKDSNMGPRPPGSPPEAALSAQVLSNSNQLLLKSVTQADAGTYTCRAIVPRIGVAEREVPLYVNGPPIISSEAVQYAVRGDGGKVECFIGSTPPPDRIAWAWKENFLEVGTLERYTVERTNSGSGVLSTLTINNVMEADFQTHYNCTAWNSFGPGTAIIQLEEREVLPVGIIAGATIGASILLIFFFIALVFFLYRRRKGSRKDVTLRKLDIKVETVNREPLTMHSDREDDTASVSTATRVMKAIYSSFKDDVDLKQDLRCDTIDTREEYEMKDPTNGYYNVRAHEDRPSSRAVLYADYRAPGPARFDGRPSSRLSHSSGYAQLNTYSRGPASDYGPEPTPPGPAAPAGTDTTSQLSYENYEKFNSHPFPGAAGYPTYRLGYPQAPPSGLERTPYEAYDPIGKYATATRFSYTSQHSDYGQRFQQRMQTHVVD

SEQ ID NO: 331 - DNA, 1230 bp, Homo sapiens
  CDS (1)..(1002)
atgcatttgactctggaagtcttaaaccatggccccttccctctaaacctttcctccattgcttacaatcatggaactgtgtttggccactggaagaataacgtcactcgggaaacgctggtgaaagtaaaagatgctgaagatcagttgggtgcacgagtgggttacatcgaactggatctcaacagcgggaaggaaacatttctggtgaatgaggaggcaacgggcgagacctcaggagacaatgttgttcattctaggaatctgtctcagacaatcttcatcacccggaaacgatgggaggggacccagacccgcttcagccaggagccagctgaccagacggtggtggctggacagcgggccgtgctcccctgtgtgctgctcaactactctggaattgtgcaatggaccaaggacgggctggccctgggcatgggccaggccctcaaagcctggccacggtaccgggttgtgggctccgcagacgctgggcagtacaacctggagatcacagatgctgagctctctgacgacgcctcttacgagtgccaggccacggaggccgccctgcgctctcggcgggccaaactcaccgtgctcatccccccagaggacaccaggattgacggaggccctgtgattctactgcaggcaggcaccccccacaacctcacatgccgggccttcaatgcgaagcctgctgccaccatcatctggttccgggacgggacgcagcaggagggcgctgtggccagcacggaattgctgaaggatgggaagagggagaccaccgtgagccaactgcttattaaccccacggacctggacatagggcgtgtcttcacttgccgaagcatgaacgaagccatccctagtggcaaggagacttccatcgagctggatgtgcaccgtgagtgggctggggggagcagtctggagcaggggggtggaagaaggggtgtgtttgagaagcacactcttagtttgagaaacacaaactaagagtccccctatggtccccaggacaaacgcttgccttcttcacatctttcattccctggattgaaccatggggactaagggctggtagagcattggctgtggagtcaggcagtccccaggtctaaaccagcctgttattagtcaatggtttacactctctgggcctcggtttccagttctgtatactgtatattgcaaaagataaaatactggcctacagcccca

SEQ ID NO: 332 - protein, 334 aa, Homo sapiens
MHLTLEVLNHGPFPLNLSSIAYNHGTVFGHWKNNVTRETLVKVKDAEDQLGARVGYIELDLNSGKETFLVNEEATGETSGDNVVHSRNLSQTIFITRKRWEGTQTRFSQEPADQTVVAGQRAVLPCVLLNYSGIVQWTKDGLALGMGQALKAWPRYRVVGSADAGQYNLEITDAELSDDASYECQATEAALRSRRAKLTVLIPPEDTRIDGGPVILLQAGTPHNLTCRAFNAKPAATIIWFRDGTQQEGAVASTELLKDGKRETTVSQLLINPTDLDIGRVFTCRSMNEAIPSGKETSIELDVHREWAGGSSLEQGGGRRGVFEKHTLSLRNTN

SEQ ID NO: 333 - DNA, 3464 bp, Homo sapiens
  CDS (1)..(2523)
atgcatttgactctggaagtcttaaaccatggccccttccctctaaacctttcctccattgcttacaatcatggaactgtgtttggccactggaagaataacgtcactcgggaaacgctggtgaaagtaaaagatgctgaagatcagttgggtgcacgagtgggttacatcgaactggatctcaacagcgggaaggaaacatttctggtgaatgaggaggcaacgggcgagacctcaggagacaatgttgttcattctaggaatctgtctcagacaatcttcatcacccggaaacgatgggaggggacccagacccgcttcagccaggagccagctgaccagacggtggtggctggacagcgggccgtgctcccctgtgtgctgctcaactactctggaattgtgcaatggaccaaggacgggctggccctgggcatgggccaggccctcaaagcctggccacggtaccgggttgtgggctccgcagacgctgggcagtacaacctggagatcacagatgctgagctctctgacgacgcctcttacgagtgccaggccacggaggccgccctgcgctctcggcgggccaaactcaccgtgctcatccccccagaggacaccaggattgacggaggccctgtgattctactgcaggcaggcaccccccacaacctcacatgccgggccttcaatgcgaagcctgctgccaccatcatctggttccgggacgggacgcagcaggagggcgctgtggccagcacggaattgctgaaggatgggaagagggagaccaccgtgagccaactgcttattaaccccacggacctggacatagggcgtgtcttcacttgccgaagcatgaacgaagccatccctagtggcaaggagacttccatcgagctggatgtgcaccaccctcctacagtgaccctgtccattgagccacagacggtgcaggagggtgagcgtgttgtctttacctgccaggccacagccaaccccgagatcttgggctacaggtgggccaaagggggtttcttgattgaagacgcccacgagagtcgctatgagacaaatgtggattattcctttttcacggagcctgtgtcttgtgaggttcacaacaaagtgggaagcaccaatgtcagcactttagtaaatgtccactttgctccccggattgtagttgaccccaaacccacaaccacagacattggctctgatgtgacccttacctgtgtctgggttgggaatccccccctcactctcacctggaccaaaaaggactcaaatatggtcctgagtaacagcaaccagctgctgctgaagtcggtgactcaggcagacgctggcacctacacctgccgggccatcgtgcctcgaatcggagtggctgagcgggaggtgccgctctatgtgaacgggccccccatcatctccagtgaggcagtgcagtatgctgtgaggggtgacggtggcaaggtggagtgtttcattgggagcacaccacccccagaccgcatagcatgggcctggaaggagaacttcttggaggtggggaccctggaacgctatacagtggagaggaccaactcaggcagtggggtgctatccacgctcaccatcaacaatgtcatggaggccgactttcagactcactacaactgcaccgcctggaacagcttcgggccaggcacagccatcatccagctggaagagcgagaggtgttacctgtgggcatcatagctggggccaccatcggcgcgagcatcctgctcatcttcttcttcatcgccttggtattcttcctctaccggcgccgcaaaggcagtcgcaaagacgtgaccctgaggaagctggatatcaaggtggagacagtgaaccgagagccacttacgatgcattctgaccgggaggatgacaccgccagcgtctccacagcaacccgggtcatgaaggccatctactcgtcgtttaaggatgatgtggatctgaagcaggacctgcgctgcgacaccatcgacacccgggaggagtatgagatgaaggaccccaccaatggctactacaacgtgcgtgcccatgaagaccgcccgtcttccagggcagtgctctatgctgactaccgtgcccctggccctgcccgcttcgacggccgcccctcatcccgtctctcccactccagcggctatgcccagctcaacacctatagccggggccctgcctctgactatggccctgagcccacaccccctggccctgctgccccagctggcactgacacaaccagccagctgtcctacgagaactatgagaagttcaactcccatcccttccctggggcagctgggtaccccacctaccgactgggctacccccaggccccaccctctggcctggagcggaccccatatgaggcgtatgaccccattggcaagtacgccacagccactcgattctcctacacctcccagcactcggactacggccagcgattccagcagcgcatgcagactcacgtgtaggggccagagcctggctggggcatctctgcggggcagaggagaaggctttcgcagctgttccctgatattcagggacattgctcattgctcccttctcggaccagccttcttcctcccaccatggcaggtggggagcaggtctcccagagacaccccgtcccgaggatggtgctctgtgcatgccccagcctcctgggcctgcccttccctcttcttcgggaggatgtgtctcttctgacctgcactcttgcctgaccctagaatggggacagggaaagtgaaggttagggaaagcagaggggggcactttttagcattccctttctatcccacccctctgatctcccataagtggaaatgggggtacccagggatgggcaggctttggcctagggacatgaagtatgggagtgggtggctgtggcacagacaggtggaaaacgggatagcctggccagtccctctgttgtctgcattcgtgccctgggtgcctctctccttcctcagggtactgcagaagggagcgaacagggtactgttcgctcttgtctacagaacagccctggcactgcattcaaatccagtcttcattcagctgggatcaaaatgccagtcaccttggctacccactgtggacagctgtctgtcagcatgcagagggatccaggaatccccccggcagcacggcccgctttccttctcctccatgctgggccagccagataagtcagggtcctggtggagaaagaaaggctaggaccatgtcctcattgacccagatactgctgtgtgctgcacagcagtgaaccaacactagagggagccacacaagcctcctctccccagtctgccccacttcctggctttaactcttgagctggtttggggagtggtgaggtaggggtgggggtgctgtaggctctttttcaaaaaaaaac

SEQ ID NO: 334 - protein, 841 aa, Homo sapiens
MHLTLEVLNHGPFPLNLSSIAYNHGTVFGHWKNNVTRETLVKVKDAEDQLGARVGYIELDLNSGKETFLVNEEATGETSGDNVVHSRNLSQTIFITRKRWEGTQTRFSQEPADQTVVAGQRAVLPCVLLNYSGIVQWTKDGLALGMGQALKAWPRYRVVGSADAGQYNLEITDAELSDDASYECQATEAALRSRRAKLTVLIPPEDTRIDGGPVILLQAGTPHNLTCRAFNAKPAATIIWFRDGTQQEGAVASTELLKDGKRETTVSQLLINPTDLDIGRVFTCRSMNEAIPSGKETSIELDVHHPPTVTLSIEPQTVQEGERVVFTCQATANPEILGYRWAKGGFLIEDAHESRYETNVDYSFFTEPVSCEVHNKVGSTNVSTLVNVHFAPRIVVDPKPTTTDIGSDVTLTCVWVGNPPLTLTWTKKDSNMVLSNSNQLLLKSVTQADAGTYTCRAIVPRIGVAEREVPLYVNGPPIISSEAVQYAVRGDGGKVECFIGSTPPPDRIAWAWKENFLEVGTLERYTVERTNSGSGVLSTLTINNVMEADFQTHYNCTAWNSFGPGTAIIQLEEREVLPVGIIAGATIGASILLIFFFIALVFFLYRRRKGSRKDVTLRKLDIKVETVNREPLTMHSDREDDTASVSTATRVMKAIYSSFKDDVDLKQDLRCDTIDTREEYEMKDPTNGYYNVRAHEDRPSSRAVLYADYRAPGPARFDGRPSSRLSHSSGYAQLNTYSRGPASDYGPEPTPPGPAAPAGTDTTSQLSYENYEKFNSHPFPGAAGYPTYRLGYPQAPPSGLERTPYEAYDPIGKYATATRFSYTSQHSDYGQRFQQRMQTHV

SEQ ID NO: 335 - DNA, 3379 bp, Homo sapiens
  CDS (351)..(2438)
ctctccgatactttctcccaagggtcagctgcttcttcattccaagtggacaaggagccagctgctcactgtccttgagagacttcagcgagagaccagggtgtccaggctccatgcaggaaagccatgcgtataaattccacctctgagccaggcctcaccagcaagcccactcttaagcccttgacttgggctccaggggccatgggaaggagaaacggacccagacccgcttcagccaggagccagctgaccagacggtggtggctggacagcgggccgtgctcccctgtgtgctgctcaactactctggaattgtgcaatggaccaaggacgggctggccctgggcatgggccaggccctcaaagcctggccacggtaccgggttgtgggctccgcagacgctgggcagtacaacctggagatcacagatgctgagctctctgacgacgcctcttacgagtgccaggccacggaggccgccctgcgctctcggcgggccaaactcaccgtgctcatccccccagaggacaccaggattgacggaggccctgtgattctactgcaggcaggcaccccccacaacctcacatgccgggccttcaatgcgaagcctgctgccaccatcatctggttccgggacgggacgcagcaggagggcgctgtggccagcacggaattgctgaaggatgggaagagggagaccaccgtgagccaactgcttattaaccccacggacctggacatagggcgtgtcttcacttgccgaagcatgaacgaagccatccctagtggcaaggagacttccatcgagctggatgtgcaccaccctcctacagtgaccctgtccattgagccacagacggtgcaggagggtgagcgtgttgtctttacctgccaggccacagccaaccccgagatcttgggctacaggtgggccaaagggggtttcttgattgaagacgcccacgagagtcgctatgagacaaatgtggattattcctttttcacggagcctgtgtcttgtgaggttcacaacaaagtgggaagcaccaatgtcagcactttagtaaatgtccactttgctccccggattgtagttgaccccaaacccacaaccacagacattggctctgatgtgacccttacctgtgtctgggttgggaatccccccctcactctcacctggaccaaaaaggactcaaatatggtcctgagtaacagcaaccagctgctgctgaagtcggtgactcaggcagacgctggcacctacacctgccgggccatcgtgcctcgaatcggagtggctgagcgggaggtgccgctctatgtgaacgggccccccatcatctccagtgaggcagtgcagtatgctgtgaggggtgacggtggcaaggtggagtgtttcattgggagcacaccacccccagaccgcatagcatgggcctggaaggagaacttcttggaggtggggaccctggaacgctatacagtggagaggaccaactcaggcagtggggtgctatccacgctcaccatcaacaatgtcatggaggccgactttcagactcactacaactgcaccgcctggaacagcttcgggccaggcacagccatcatccagctggaagagcgagaggtgttacctgtgggcatcatagctggggccaccatcggcgcgagcatcctgctcatcttcttcttcatcgccttggtattcttcctctaccggcgccgcaaaggcagtcgcaaagacgtgaccctgaggaagctggatatcaaggtggagacagtgaaccgagagccacttacgatgcattctgaccgggaggatgacaccgccagcgtctccacagcaacccgggtcatgaaggccatctactcgtcgtttaaggatgatgtggatctgaagcaggacctgcgctgcgacaccatcgacacccgggaggagtatgagatgaaggaccccaccaatggctactacaacgtgcgtgcccatgaagaccgcccgtcttccagggcagtgctctatgctgactaccgtgcccctggccctgcccgcttcgacggccgcccctcatcccgtctctcccactccagcggctatgcccagctcaacacctatagccggggccctgcctctgactatggccctgagcccacaccccctggccctgctgccccagctggcactgacacaaccagccagctgtcctacgagaactatgagaagttcaactcccatcccttccctggggcagctgggtaccccacctaccgactgggctacccccaggccccaccctctggcctggagcggaccccatatgaggcgtatgaccccattggcaagtacgccacagccactcgattctcctacacctcccagcactcggactacggccagcgattccagcagcgcatgcagactcacgtgtaggggccagagcctggctggggcatctctgcggggcagaggagaaggctttcgcagctgttccctgatattcagggacattgctcattgctcccttctcggaccagccttcttcctcccaccatggcaggtggggagcaggtctcccagagacaccccgtcccgaggatggtgctctgtgcatgccccagcctcctgggcctgcccttccctcttcttcgggaggatgtgtctcttctgacctgcactcttgcctgaccctagaatggggacagggaaagtgaaggttagggaaagcagaggggggcactttttagcattccctttctatcccacccctctgatctcccataagtggaaatgggggtacccagggatgggcaggctttggcctagggacatgaagtatgggagtgggtggctgtggcacagacaggtggaaaacgggatagcctggccagtccctctgttgtctgcattcgtgccctgggtgcctctctccttcctcagggtactgcagaagggagcgaacagggtactgttcgctcttgtctacagaacagccctggcactgcattcaaatccagtcttcattcagctgggatcaaaatgccagtcaccttggctacccactgtggacagctgtctgtcagcatgcagagggatccaggaatccccccggcagcacggcccgctttccttctcctccatgctgggccagccagataagtcagggtcctggtggagaaagaaaggctaggaccatgtcctcattgacccagatactgctgtgtgctgcacagcagtgaaccaacactagagggagccacacaagcctcctctccccagtctgccccacttcctggctttaactcttgagctggtttggggagtggtgaggtaggggtgggggtgctgtaggctctttttcaaaaaaaaac

SEQ ID NO: 336 - protein, 696 aa, Homo sapiens
MGQALKAWPRYRVVGSADAGQYNLEITDAELSDDASYECQATEAALRSRRAKLTVLIPPEDTRIDGGPVILLQAGTPHNLTCRAFNAKPAATIIWFRDGTQQEGAVASTELLKDGKRETTVSQLLINPTDLDIGRVFTCRSMNEAIPSGKETSIELDVHHPPTVTLSIEPQTVQEGERVVFTCQATANPEILGYRWAKGGFLIEDAHESRYETNVDYSFFTEPVSCEVHNKVGSTNVSTLVNVHFAPRIVVDPKPTTTDIGSDVTLTCVWVGNPPLTLTWTKKDSNMVLSNSNQLLLKSVTQADAGTYTCRAIVPRIGVAEREVPLYVNGPPIISSEAVQYAVRGDGGKVECFIGSTPPPDRIAWAWKENFLEVGTLERYTVERTNSGSGVLSTLTINNVMEADFQTHYNCTAWNSFGPGTAIIQLEEREVLPVGIIAGATIGASILLIFFFIALVFFLYRRRKGSRKDVTLRKLDIKVETVNREPLTMHSDREDDTASVSTATRVMKAIYSSFKDDVDLKQDLRCDTIDTREEYEMKDPTNGYYNVRAHEDRPSSRAVLYADYRAPGPARFDGRPSSRLSHSSGYAQLNTYSRGPASDYGPEPTPPGPAAPAGTDTTSQLSYENYEKFNSHPFPGAAGYPTYRLGYPQAPPSGLERTPYEAYDPIGKYATATRFSYTSQHSDYGQRFQQRMQTHV

SEQ ID NO: 337 - DNA, 1145 bp, Homo sapiens
  CDS (351)..(917)
ctctccgatactttctcccaagggtcagctgcttcttcattccaagtggacaaggagccagctgctcactgtccttgagagacttcagcgagagaccagggtgtccaggctccatgcaggaaagccatgcgtataaattccacctctgagccaggcctcaccagcaagcccactcttaagcccttgacttgggctccaggggccatgggaaggagaaacggacccagacccgcttcagccaggagccagctgaccagacggtggtggctggacagcgggccgtgctcccctgtgtgctgctcaactactctggaattgtgcaatggaccaaggacgggctggccctgggcatgggccaggccctcaaagcctggccacggtaccgggttgtgggctccgcagacgctgggcagtacaacctggagatcacagatgctgagctctctgacgacgcctcttacgagtgccaggccacggaggccgccctgcgctctcggcgggccaaactcaccgtgctcatccccccagaggacaccaggattgacggaggccctgtgattctactgcaggcaggcaccccccacaacctcacatgccgggccttcaatgcgaagcctgctgccaccatcatctggttccgggacgggacgcagcaggagggcgctgtggccagcacggaattgctgaaggatgggaagagggagaccaccgtgagccaactgcttattaaccccacggacctggacatagggcgtgtcttcacttgccgaagcatgaacgaagccatccctagtggcaaggagacttccatcgagctggatgtgcaccgtgagtgggctggggggagcagtctggagcaggggggtggaagaaggggtgtgtttgagaagcacactcttagtttgagaaacacaaactaagagtccccctatggtccccaggacaaacgcttgccttcttcacatctttcattccctggattgaaccatggggactaagggctggtagagcattggctgtggagtcaggcagtccccaggtctaaaccagcctgttattagtcaatggtttacactctctgggcctcggtttccagttctgtatactgtatattgcaaaagataaaatactggcctacagcccca

SEQ ID NO: 338 - protein, 189 aa, Homo sapiens
MGQALKAWPRYRVVGSADAGQYNLEITDAELSDDASYECQATEAALRSRRAKLTVLIPPEDTRIDGGPVILLQAGTPHNLTCRAFNAKPAATIIWFRDGTQQEGAVASTELLKDGKRETTVSQLLINPTDLDIGRVFTCRSMNEAIPSGKETSIELDVHREWAGGSSLEQGGGRRGVFEKHTLSLRNTN

SEQ ID NO: 339 - DNA, 1148 bp, Homo sapiens
  CDS (351)..(917)
ctctccgatactttctcccaagggtcagctgcttcttcattccaagtggacaaggagccagctgctcactgtccttgagagacttcagcgagagaccagggtgtccaggctccatgcaggaaagccatgcgtataaattccacctctgagccaggcctcaccagcaagcccactcttaagcccttgacttgggctccaggggccatgggaaggagaaacggacccagacccgcttcagccaggagccagctgaccagacggtggtggctggacagcgggccgtgctcccctgtgtgctgctcaactactctggaattgtgcaatggaccaaggacgggctggccctgggcatgggccaggccctcaaagcctggccacggtaccgggttgtgggctccgcagacgctgggcagtacaacctggagatcacagatgctgagctctctgacgacgcctcttacgagtgccaggccacggaggccgccctgcgctctcggcgggccaaactcaccgtgctcatccccccagaggacaccaggattgacggaggccctgtgattctactgcaggcaggcaccccccacaacctcacatgccgggccttcaatgcgaagcctgctgccaccatcatctggttccgggacgggacgcagcaggagggcgctgtggccagcacggaattgctgaaggatgggaagagggagaccaccgtgagccaactgcttattaaccccacggacctggacatagggcgtgtcttcacttgccgaagcatgaacgaagccatccctagtggcaaggagacttccatcgagctggatgtgcaccgtgagtgggctggggggagcagtctggagcaggggggtggaagaaggggtgtgtttgagaagcacactcttagtttgagaaacacaaactaagagtccccctatggtccccaggacaaacgcttgccttcttcacatctttcattccctggattgaaccatggggactaagggctggtagagcattggctgtggagtcaggcagtccccaggtctaaaccagcctgttattagtcaatggtttacactctctgggcctcggtttccagttctgtatactgtatattgcaaaagataaaatactggcctacagccccaaaa

SEQ ID NO: 340 - protein, 189 aa, Homo sapiens; identical to SEQ ID NO: 338

SEQ ID NO: 341 - DNA, 1148 bp, Homo sapiens; identical to SEQ ID NO: 339
  CDS (351)..(917)

SEQ ID NO: 342 - protein, 189 aa, Homo sapiens; identical to SEQ ID NO: 338

SEQ ID NO: 343 - DNA, 1407 bp, Homo sapiens
  CDS (1)..(1407)
cgcttcagccaggagccagctgaccagacggtggtggctggacagcgggccgtgctcccctgtgtgctgctcaactactctggaattgtgcaatggaccaaggacgggctggccctgggcatgggccaggccctcaaagcctggccacggtaccgggttgtgggctccgcagacgctgggcagtacaacctggagatcacagatgctgagctctctgacgacgcctcttacgagtgccaggccacggaggccgccctgcgctctcggcgggccaaactcaccgtgctcatccccccagaggacaccaggattgacggaggccctgtgattctactgcaggcaggcaccccccacaacctcacatgccgggccttcaatgcgaagcctgctgccaccatcatctggttccgggacgggacgcagcaggagggcgctgtggccagcacggaattgctgaaggatgggaagagggagaccaccgtgagccaactgcttattaaccccacggacctggacatagggcgtgtcttcacttgccgaagcatgaacgaagccatccctagtggcaaggagacttccatcgagctggatgtgcaccaccctcctacagtgaccctgtccattgagccacagacggtgcaggagggtgagcgtgttgtctttacctgccaggccacagccaaccccgagatcttgggctacaggtgggccaaagggggtttcttgattgaagacgcccacgagagtcgctatgagacaaatgtggattattcctttttcacggagcctgtgtcttgtgaggttcacaacaaagtgggaagcaccaatgtcagcactttagtaaatgtccactttgctccccggattgtagttgaccccaaacccacaaccacagacattggctctgatgtgacccttacctgtgtctgggttgggaatccccccctcactctcacctggaccaaaaaggactcaaatatggtcctgagtaacagcaaccagctgctgctgaagtcggtgactcaggcagacgctggcacctacacctgccgggccatcgtgcctcgaatcggagtggctgagcgggaggtgccgctctatgtgaacgggccccccatcatctccagtgaggcagtgcagtatgctgtgaggggtgacggtggcaaggtggagtgtttcattgggagcacaccacccccagaccgcatagcatgggcctggaaggagaacttcttggaggtggggaccctggaacgctatacagtggagaggaccaactcaggcagtggggtgctatccacgctcaccatcaacaatgtcatggaggccgactttcagactcactacaactgcaccgcctggaacagcttcgggccaggcacagccatcatccagctggaagagcga

SEQ ID NO: 344 - protein, 469 aa, Homo sapiens
RFSQEPADQTVVAGQRAVLPCVLLNYSGIVQWTKDGLALGMGQALKAWPRYRVVGSADAGQYNLEITDAELSDDASYECQATEAALRSRRAKLTVLIPPEDTRIDGGPVILLQAGTPHNLTCRAFNAKPAATIIWFRDGTQQEGAVASTELLKDGKRETTVSQLLINPTDLDIGRVFTCRSMNEAIPSGKETSIELDVHHPPTVTLSIEPQTVQEGERVVFTCQATANPEILGYRWAKGGFLIEDAHESRYETNVDYSFFTEPVSCEVHNKVGSTNVSTLVNVHFAPRIVVDPKPTTTDIGSDVTLTCVWVGNPPLTLTWTKKDSNMVLSNSNQLLLKSVTQADAGTYTCRAIVPRIGVAEREVPLYVNGPPIISSEAVQYAVRGDGGKVECFIGSTPPPDRIAWAWKENFLEVGTLERYTVERTNSGSGVLSTLTINNVMEADFQTHYNCTAWNSFGPGTAIIQLEER

SEQ ID NO: 345 - DNA, 2128 bp, Homo sapiens; identical to SEQ ID NO: 323
  CDS (31)..(2118)

SEQ ID NO: 346 - protein, 696 aa, Homo sapiens; identical to SEQ ID NO: 324

SEQ ID NO: 347 - DNA, 2336 bp, Homo sapiens; identical to SEQ ID NO: 329
  CDS (11)..(2329)

SEQ ID NO: 348 - protein, 773 aa, Homo sapiens
MLSLLVWILTLSDTFSQGTQTRFSQEPADQTVVAGQRAVLPCVLLNYSGIVQWTKDGLALGMGQGLKAWPRYRVVGSADAGQYNLEITDAELSDDASYECQATEAALRSRRAKLTVLIPPEDTRIDGGPVILLQAGTPHNLTCRAFNAKPAATIIWFRDGTQQEGAVASTELLKDGKRETTVSQLLINPTDLDIGRVFTCRSMNEAIPSGKETSIELDVHHPPTVTLSIEPQTVQEGERVVFTCQATANPEILGYRWAKGGFLIEDAHESRYETNVDYSFFTEPVSCEVHNKVGSTNVSTLVNVHFAPRIVVDPKPTTTDIGSDVTLTCVWVGNPPLTLTWTKKDSNMGPRPPGSPPEAALSAQVLSNSNQLLLKSVTQADAGTYTCRAIVPRIGVAEREVPLYVNGPPIISSEAVQYAVRGDGGKVECFIGSTPPPDRIAWAWKENFLEVGTLERYTVERTNSGSGVLSTLTINNVMEADFQTHYNCTAWNSFGPGTAIIQLEEREVLPVGIIAGATIGASILLIFFFIALVFFLYRRRKGSRKDVTLRKLDIKVETVNREPLTMHSDREDDTASVSTATRVMKAIYSSFKDDVDLKQDLRCDTIDTREEYEMKDPTNGYYNVRAHEDRPSSRAVLYADYRAPGPARFDGRPSSRLSHSSGYAQLNTYSRGPASDYGPEPTPPGPAAPAGTDTTSQLSYENYEKFNSHPFPGAAGYPTYRLGYPQAPPSGLERTPYEAYDPIGKYATATRFSYTSQHSDYGQRFQQRMQTHV

SEQ ID NO: 349 - DNA, 2290 bp, Homo sapiens; identical to SEQ ID NO: 327
  CDS (11)..(2281)

SEQ ID NO: 350 - protein, 757 aa, Homo sapiens; identical to SEQ ID NO: 320

SEQ ID NO: 351 - DNA, 2290 bp, Homo sapiens
  CDS (11)..(2281)
caccaagcttcaagggacccagacccgcttcagccaggagccagctgaccagacggtggtggctggacagcgggccgtgctcccctgtgtgctgctcaactactctggaattgtgcaatggaccaaggacgggctggccctgggcatgggccagggcctcaaagcctggccacggtaccgggttgtgggctccgcagacgctgggcagtacaacctggagatcacagatgctgagctctctgacgacgcctcttacgagtgccaggccacggaggccgccctgcgctctcggcgggccaaactcaccgtgctcatccccccagaggacaccaggattgacggaggccctgtgattctactgcaggcaggcaccccccacaacctcacatgccgggccttcaatgcgaagcctgctgccaccatcatctggttccgggacgggacgcagcaggagggcgctgtggccagcacggaattgctgaaggatgggaagagggagaccaccgtgagccaactgcttattaaccccacggacctggacatagggcgtgtcttcacttgccgaagcatgaacgaagccatccctagtggcaaggagacttccatcgagctggatgtgcaccaccctcctacagtgaccctgtccattgagccacagacggtgcaggagggtgagcgtgttgtctttacctgccaggccacagccaacccggagatcttgggctacaggtgggccaaagggggtttcttgattgaagacgcccacgagagtcgctatgagacaaatgtggattattcctttttcacggagcctgtgtcttgtgaggttcacaacaaagtgggaagcaccaatgtcagcactttagtaaatgtccactttgctccccggattgtagttgaccccaaacccacaaccacagacattggctctgatgtgacccttacctgtgtctgggttgggaatccccccctcactctcacctggaccaaaaaggactcaaatatggggcccaggcctcctggctccccacccgaggctgctctctctgcccaggtcctgagtaacagcaaccagctgctgctgaagtcggtgactcaggcagacgctggcacctacacctgccgggccatcgtgcctcgaatcggagtggctgagcgggaggtgccgctctatgtgaacgggccccccatcatctccagtgaggcagtgcagtatgctgtgaggggtgacggtggcaaggtggagtgtttcattgggagcacaccacccccagaccgcatagcatgggcctggaaggagaacttcttggaggtggggaccctggaacgctatacagtggagaggaccaactcaggcagtggggtgctatccacgctcaccatcaacaatgtcatggaggccgactttcagactcactacaactgcaccgcctggaacagcttcgggccaggcacagccatcatccagctggaagagcgagaggtgttacctgtgggcatcatagctggggccaccatcggcgcgagcatcctgctcatcttcttcttcatcgccttggtattcttcctctaccggcgccgcaaaggcagtcgcaaagacgtgaccctgaggaagctggatatcaaggtggagacagtgaaccgagagccacttacgatgcattctgaccgggaggatgacaccgccagcgtctccacagcaacccgggtcatgaaggccatctactcgtcgtttaaggatgatgtggatctgaagcaggacctgcgctgcgacaccatcgacacccgggaggagtatgagatgaaggaccccaccaatggctactacaacgtgcgtgcccatgaagaccgcccgtcttccagggcagtgctctatgctgactaccgtgcccctggccctgcccgcttcgacggccgcccctcatcccgtctctcccactccagcggctatgcccagctcaacacctatagccggggccctgcctctgactatggccctgagcccacaccccctggccctgctgccccagctggcactgacacaaccagccagctgtcctacgagaactatgagaagttcaactcccatcccttccctggggcagctgggtaccccacctaccgactgggctacccccaggccccaccctctggcctggagcggaccccatatgaggcgtatgaccccattggcaagtacgccacagccactcgattctcctacacctcccagcactcggactacggccagcgattccagcagcgcatgcagactcacgtggtcgacggc

SEQ ID NO: 352 - protein, 757 aa, Homo sapiens
QGTQTRFSQEPADQTVVAGQRAVLPCVLLNYSGIVQWTKDGLALGMGQGLKAWPRYRVVGSADAGQYNLEITDAELSDDASYECQATEAALRSRRAKLTVLIPPEDTRIDGGPVILLQAGTPHNLTCRAFNAKPAATIIWFRDGTQQEGAVASTELLKDGKRETTVSQLLINPTDLDIGRVFTCRSMNEAIPSGKETSIELDVHHPPTVTLSIEPQTVQEGERVVFTCQATANPEILGYRWAKGGFLIEDAHESRYETNVDYSFFTEPVSCEVHNKVGSTNVSTLVNVHFAPRIVVDPKPTTTDIGSDVTLTCVWVGNPPLTLTWTKKDSNMGPRPPGSPPEAALSAQVLSNSNQLLLKSVTQADAGTYTCRAIVPRIGVAEREVPLYVNGPPIISSEAVQYAVRGDGGKVECFIGSTPPPDRIAWAWKENFLEVGTLERYTVERTNSGSGVLSTLTINNVMEADFQTHYNCTAWNSFGPGTAIIQLEEREVLPVGIIAGATIGASILLIFFFIALVFFLYRRRKGSRKDVTLRKLDIKVETVNREPLTMHSDREDDTASVSTATRVMKAIYSSFKDDVDLKQDLRCDTIDTREEYEMKDPTNGYYNVRAHEDRPSSRAVLYADYRAPGPARFDGRPSSRLSHSSGYAQLNTYSRGPASDYGPEPTPPGPAAPAGTDTTSQLSYENYEKFNSHPFPGAAGYPTYRLGYPQAPPSGLERTPYEAYDPIGKYATATRFSYTSQHSDYGQRFQQRMQTHV

SEQ ID NO: 353 - DNA, 2128 bp, Homo sapiens
  CDS (31)..(2118)
caatggaccaaggacgggctggccctgggcatgggccagggcctcaaagcctggccacggtaccgggttgtgggctccgcagacgctgggcagtacaacctggagatcacagatgctgagctctctgacgacgcctcttacgagtgccaggccacggaggccgccctgcgctctcggcgggccaaactcaccgtgctcatccccccagaggacaccaggattgacggaggccctgtgattctactgcaggcaggcaccccccacaacctcacatgccgggccttcaatgcgaagcctgctgccaccatcatctggttccgggacgggacgcagcaggagggcgctgtggccagcacggaattgctgaaggatgggaagagggagaccaccgtgagccaactgcttattaaccccacggacctggacatagggcgtgtcttcacttgccgaagcatgaacgaagccatccctagtggcaaggagactcccatcgagctggatgtgcaccaccctcctacagtgaccctgtccattgagccacagacggtgcaggagggtgagcgtgttgtctttacctgccaggccacagccaaccccgagatcttggactacaggtgggccaaagggggtttcttgattgaagacgcccacgagagtcgctatgagacaaatgtggattattcctttttcacggagcctgtgtcttgtgaggttcacaacaaagtgggaagcaccaatgtcagcactttagtaaatgtccactttgctccccggattgtagttgaccccaaacccacaaccacagacattggctctgatgtgacccttacctgtgtctgggttgggaatccccccctcactctcacctggaccaaaaaggactcaaatatggtcctgagtaacagcaaccagctgctgctgaagtcggtgactcaggcagacgctggcacctacacctgccgggccatcgtgcctcgaatcggagtggctgagcgggaggtgccgctctatgtgaacgggccccccatcatctccagtgaggcagtgcagtatgctgtgaggggtgacggtggcaaggtggagtgtttcattgggagcacaccacccccagaccgcatagcatgggcctggaaggagaacttcttggaggtggggaccctggaacgctatacagtggagaggaccaactcaggcagtggggtgctatccacgctcaccatcaacaatgtcatggaggccgactttcagactcactacaactgcaccgcctggaacagcttcgggccaggcacagccatcatccagctggaagagcgagaggtgttacctgtgggcatcatagctggggccaccatcggcgcgagcatcctgctcatcttcttcttcatcgccttggtattcttcctctaccggcgccgcaaaggcagtcgcaaagacgtgaccctgaggaagctggatatcaaggtggagacagtgaaccgagagccacttacgatgcattctgaccgggaggatgacaccgccagcgtctccacagcaacccgggtcatgaaggccatctactcgtcgtttatggatgatgtggatctgaagcaggacctgcgctgcgacaccatcgacacccgggaggagtatgagatgaaggaccccaccaatggctactacaacgtgcgtgcccatgaagaccgcccgtcttccagggcagtgctctatgctgactaccgtgcccctggccctgcccgcttcgacggccgcccctcatcccgtctctcccactccagcggctatgcccagctcaacacctatagccggggccctgcctctgactatggccctgagcccacaccccctggccctgctgccccagctggcactgacacaaccagccagctgtcctacgagaactatgagaagttcaactcccatcccttccctggggcagctgggtaccccacctaccgactgggctacccccaggccccaccctctggcctggagcggaccccatatgaggcgtatgaccccattggcaagtacgccacagccactcgattctcctacacctcccagcactcggactacggccagcgattccagcagcgcatgcagactcacgtgtaggggccag

SEQ ID NO: 354 - protein, 696 aa, Homo sapiens
MGQGLKAWPRYRVVGSADAGQYNLEITDAELSDDASYECQATEAALRSRRAKLTVLIPPEDTRIDGGPVILLQAGTPHNLTCRAFNAKPAATIIWFRDGTQQEGAVASTELLKDGKRETTVSQLLINPTDLDIGRVFTCRSMNEAIPSGKETPIELDVHHPPTVTLSIEPQTVQEGERVVFTCQATANPEILDYRWAKGGFLIEDAHESRYETNVDYSFFTEPVSCEVHNKVGSTNVSTLVNVHFAPRIVVDPKPTTTDIGSDVTLTCVWVGNPPLTLTWTKKDSNMVLSNSNQLLLKSVTQADAGTYTCRAIVPRIGVAEREVPLYVNGPPIISSEAVQYAVRGDGGKVECFIGSTPPPDRIAWAWKENFLEVGTLERYTVERTNSGSGVLSTLTINNVMEADFQTHYNCTAWNSFGPGTAIIQLEEREVLPVGIIAGATIGASILLIFFFIALVFFLYRRRKGSRKDVTLRKLDIKVETVNREPLTMHSDREDDTASVSTATRVMKAIYSSFMDDVDLKQDLRCDTIDTREEYEMKDPTNGYYNVRAHEDRPSSRAVLYADYRAPGPARFDGRPSSRLSHSSGYAQLNTYSRGPASDYGPEPTPPGPAAPAGTDTTSQLSYENYEKFNSHPFPGAAGYPTYRLGYPQAPPSGLERTPYEAYDPIGKYATATRFSYTSQHSDYGQRFQQRMQTHV

SEQ ID NO: 355 - DNA, 2128 bp, Homo sapiens
  CDS (31)..(2118)
caatggaccaaggacgggctggccctgggcatgggccagggcctcaaagcctggccacggtaccgggttgtgggctccgcagacgctgggcagtacaacctggagatcacagatgctgagctctctgacgacgcctcttacgagtgccaggccacggaggccgccctgcgctctcggcgggccaaactcaccgtgctcatccccccagaggacaccaggattgacggaggccctgtgattctactgcaggcaggcaccccccacaacctcacatgccgggccttcaatgcgaagcctgctgccaccatcatctggttccgggacgggacgcagcaggagggcgctgtggccagcacggaattgctgaaggatgggaagagggagaccaccgtgagccaactgcttattaaccccacggacctggacatagggcgtgtcttcacttgccgaagcatgaacgaagccatccctagtggcaaggagacttccatcgagctggatgtgcaccaccctcctacagtgaccctgtccattgagccacagacggtgcaggagggtgagcgtgttgtctttacctgccaggccacagccaacccggagatcttggactacaggtgggccaaagggggtttcttgattgaagacgcccacgagagtcgctatgagacaaatgtggattattcctttttcacggagcctgtgtcttgtgaggttcacaacaaagtgggaagcaccaatgtcagcactttagtaaatgtccactttgctccccggattgtagttgaccccaaacccacaaccacagacattggctctgatgtgacccttacctgtgtctgggttgggaatccccccctcactctcacctggaccaaaaaggactcaaatatggtcctgagtaacagcaaccagctgctgctgaagtcggtgactcaggcagacgctggcacctacacctgccgggccatcgtgcctcgaatcggagtggctgagcgggaggtgccgctctatgtgaacgggccccccatcatctccagtgaggcagtgcagtatgctgtgaggggtgacggtggcaaggtggagtgtttcattgggagcacaccacccccagaccgcatagcatgggcctggaaggagaacttcttggaggtggggaccctggaacgctatacagtggagaggaccaactcaggcagtggggtgctatccacgctcaccatcaacaatgtcatggaggccgactttcagactcactacaactgcaccgcctggaacagcttcgggccaggcacagccatcatccagctggaagagcgagaggtgttacctgtgggcatcatagctggggccaccatcggcgcgagcatcctgctcatcttcttcttcatcgccttggtattcttcctctaccggcgccgcaaaggcagtcgcaaagacgtgaccctgaggaagctggatatcaaggtggagacagtgaaccgagagccacttacgatgcattctgaccgggaggatgacaccgccagcgtctccacagcaacccgggtcatgaaggccatctactcgtcgtttatggatgatgtggatctgaagcaggacctgcgctgcgacaccatcgacacccgggaggagtatgagatgaaggaccccaccaatggctactacaacgtgcgtgcccatgaagaccgcccgtcttccagggcagtgctctatgctgactaccgtgcccctggccctgcccgcttcgacggccgcccctcatcccgtctctcccactccagcggctatgcccagctcaacacctatagccggggccctgcctctgactatggccctgagcccacaccccctggccctgctgccccagctggcactgacacaaccagccagctgtcctacgagaactatgagaagttcaactcccatcccttccctggggcagctgggtaccccacctaccgactgggctacccccaggccccaccctctggcctggagcggaccccatatgaggcgtatgaccccattggcaagtacgccacagccactcgattctcctacacctcccagcactcggactacggccagcgattccagcagcgcatgcagactcacgtgtaggggccag

SEQ ID NO: 356 - protein, 696 aa, Homo sapiens; identical to SEQ ID NO: 324

SEQ ID NO: 357 - DNA, 2128 bp, Homo sapiens
  CDS (31)..(2118)
caatggaccaaggacgggctggccctgggcatgggccagggcctcaaagcctggccacggtaccgggttgtgggctccgcagacgctgggcagtacaacctggagatcacagatgctgagctctctgacgacgcctcttacgagtgccaggccacggaggccgccctgcgctctcggcgggccaaactcaccgtgctcatccccccagaggacaccaggattgacggaggccctgtgattctactgcaggcaggcaccccccacaacctcacatgccgggccttcaatgcgaagcctgctgccaccatcatctggttccgggacgggacgcagcaggagggcgctgtggccagcacggaattgctgaaggatgggaagagggagaccaccgtgagccaactgcttattaaccccacggacctggacatagggcgtgtcttcacttgccgaagcatgaacgaagccatccctagtggcaaggagacttccatcgagctggatgtgcaccaccctcctacagtgaccctgtccattgagccacagacggtgcaggagggtgagcgtgttgtctttacctgccaggccacagccaaccccgagatcttggactacaggtgggccaaagggggtttcttgattgaagacgcccacgagagtcgctatgagacaaatgtggattattcctttttcacggagcctgtgtcttgtgaggttcacaacaaagtgggaagcaccaatgtcagcactttagtaaatgtccactttgctccccggattgtagttgaccccaaacccacaaccacagacattggctctgatgtgacccttacctgtgtctgggttgggaatccccccctcactctcacctggaccaaaaaggactcaaatatggtcctgagtaacagcaaccagctgctgctgaagtcggtgactcaggcagacgctggcacctacacctgctgggccatcgtgcctcgaatcggagtggctgagcgggaggtgccgctctatgtgaacgggccccccatcatctccagtgaggcagtgcagtatgctgtgaggggtgacggtggcaaggtggagtgtttcattgggagcacaccacccccagaccgcatagcatgggcctggaaggagaacttcttggaggtggggaccctggaacgctatacagtggagaggaccaactcaggcagtggggtgctatccacgctcaccatcaacaatgtcatggaggccgactttcagactcactacaactgcaccgcctggaacagcttcgggccaggcacagccatcatccagctggaagagcgagaggtgttacctgtgggcatcatagctggggccaccatcggcgcgagcatcctgctcatcttcttcttcatcgccttggtattcttcctctaccggcgccgcaaaggcagtcgcaaagacgtgaccctgaggaagctggatatcaaggtggagacagtgaaccgagagccacttacgatgcattctgaccgggaggatgacaccgccagcgtctccacagcaacccgggtcatgaaggccatctactcgtcgtttatggatgatgtggatctgaagcaggacctgcgctgcgacaccatcgacacccgggaggagtatgagatgaaggaccccaccaatggctactacaacgtgcgtgcccatgaagaccgcccgtcttccagggcagtgctctatgctgactaccgtgcccctggccctgcccgcttcgacggccgcccctcatcccgtctctcccactccagcggctatgcccagctcaacacctatagccggggccctgcctctgactatggccctgagcccacaccccctggccctgctgccccagctggcactgacacaaccagccagctgtcctacgagaactatgagaagttcaactcccatcccttccctggggcagctgggtaccccacctaccgactgggctacccccaggccccaccctctggcctggagcggaccccatatgaggcgtatgaccccattggcaagtacgccacagccactcgattctcctacacctcccagcactcggactacggccagcgattccagcagcgcatgcagactcacgtgtaggggccag

SEQ ID NO: 358 - protein, 696 aa, Homo sapiens
MGQGLKAWPRYRVVGSADAGQYNLEITDAELSDDASYECQATEAALRSRRAKLTVLIPPEDTRIDGGPVILLQAGTPHNLTCRAFNAKPAATIIWFRDGTQQEGAVASTELLKDGKRETTVSQLLINPTDLDIGRVFTCRSMNEAIPSGKETSIELDVHHPPTVTLSIEPQTVQEGERVVFTCQATANPEILDYRWAKGGFLIEDAHESRYETNVDYSFFTEPVSCEVHNKVGSTNVSTLVNVHFAPRIVVDPKPTTTDIGSDVTLTCVWVGNPPLTLTWTKKDSNMVLSNSNQLLLKSVTQADAGTYTCWAIVPRIGVAEREVPLYVNGPPIISSEAVQYAVRGDGGKVECFIGSTPPPDRIAWAWKENFLEVGTLERYTVERTNSGSGVLSTLTINNVMEADFQTHYNCTAWNSFGPGTAIIQLEEREVLPVGIIAGATIGASILLIFFFIALVFFLYRRRKGSRKDVTLRKLDIKVETVNREPLTMHSDREDDTASVSTATRVMKAIYSSFMDDVDLKQDLRCDTIDTREEYEMKDPTNGYYNVRAHEDRPSSRAVLYADYRAPGPARFDGRPSSRLSHSSGYAQLNTYSRGPASDYGPEPTPPGPAAPAGTDTTSQLSYENYEKFNSHPFPGAAGYPTYRLGYPQAPPSGLERTPYEAYDPIGKYATATRFSYTSQHSDYGQRFQQRMQTHV

SEQ ID NO: 359 - DNA, 2128 bp, Homo sapiens
  CDS (31)..(2118)
caatggaccaaggacgggctggccctgggcatgggccagggcctcaaagcctggccacggtaccgggttgtgggctccgcagacgctgggcagtacaacctggagatcacagatgctgagctctctgacgacgcctcttacgagtgccaggccacggaggccgccctgcgctctcggcgggccaaactcaccgtgctcatccccccagaggacaccaggattgacggaggccctgtgattctactgcaggcaggcaccccccacaacctcacatgccgggccttcaatgcgaagcctgctgccaccatcatctggttccgggacgggacgcagcaggagggcgctgtggccagcacggaattgctgaaggatgggaagagggagaccaccgtgagccaactgcttattaaccccacggacctggacatagggcgtgtcttcacttgccgaagcatgaacgaagccatccctagtggcaaggagacttccatcgagctggatgtgcaccaccctcctacagtgaccctgtccattgagccacagacggtgcaggagggtgagcgtgttgtctttacctgccaggccacagccaaccccgagatcttggactacaggtgggccaaagggggtttcttgattgaagacgcccacgagagtcgctatgagacaaatgtggattattcctttttcacggagcctgtgtcttgtgaggttcacaacaaagtgggaagcaccaatgtcagcactttagtaaatgtccactttgctccccggattgtagttgaccccaaacccacaaccacagacattggctctgatgtgacccttacctgtgtctgggttgggaatccccccctcactctcacctggaccaaaaaggactcaaatatggtcctgagtaacagcaaccagctgctgctgaagtcggtgactcaggcagacgctggcacctacacctgccgggccatcgtgcctcgaatcggagtggctgagcgggaggtgccgctctatgtgaacgggccccccatcatctccagtgaggcagtgcagtatgctgtgaggggtgacggtggcaaggtggagtgtttcattgggagcacaccacccccagaccgcatagcatgggcctggaaggagaacttcttggaggtggggaccctggaacgctatacagtggagaggaccaactcaggcagtggggtgctatccacgctcaccatcaacaatgtcatggaggccgactttcagactcactacaactgcaccgcctggaacagcttcgggccaggcacagccatcatccagctggaagagcgagaggtgttacctgtgggcatcacagctggggccaccatcggcgcgagcatcctgctcatcttcttcttcatcgccttggtattcttcctctaccggcgccgcaaaggcagtcgcaaagacgtgaccctgaggaagctggatatcaaggtggagacagtgaaccgagagccacttacgatgcattctgaccgggaggatgacaccgccagcgtctccacagcaacccgggtcatgaaggccatctactcgtcgtttatggatgatgtggatctgaagcaggacctgcgctgcgacaccatcgacacccgggaggagtatgagatgaaggaccccaccaatggctactacaacgtgcgtgcccatgaagaccgcccgtcttccagggcagtgctctatgctgactaccgtgcccctggccctgcccgcttcgacggccgcccctcatcccgtctctcccactccagcggctatgcccagctcaacacctatagccggggccctgcctctgactatggccctgagcccacaccccctggccctgctgccccagctggcactgacacaaccagccagctgtcctacgagaactatgagaagttcaactcccatcccttccctggggcagctgggtaccccacctaccgactgggctacccccaggccccaccctctggcctggagcggaccccatatgaggcgtatgaccccattggcaagtacgccacagccactcgattctcctacacctcccagcactcggactacggccagcgattccagcagcgcatgcagactcacgtgtaggggccag

SEQ ID NO: 360 - protein, 696 aa, Homo sapiens
MGQGLKAWPRYRVVGSADAGQYNLEITDAELSDDASYECQATEAALRSRRAKLTVLIPPEDTRIDGGPVILLQAGTPHNLTCRAFNAKPAATIIWFRDGTQQEGAVASTELLKDGKRETTVSQLLINPTDLDIGRVFTCRSMNEAIPSGKETSIELDVHHPPTVTLSIEPQTVQEGERVVFTCQATANPEILDYRWAKGGFLIEDAHESRYETNVDYSFFTEPVSCEVHNKVGSTNVSTLVNVHFAPRIVVDPKPTTTDIGSDVTLTCVWVGNPPLTLTWTKKDSNMVLSNSNQLLLKSVTQADAGTYTCRAIVPRIGVAEREVPLYVNGPPIISSEAVQYAVRGDGGKVECFIGSTPPPDRIAWAWKENFLEVGTLERYTVERTNSGSGVLSTLTINNVMEADFQTHYNCTAWNSFGPGTAIIQLEEREVLPVGITAGATIGASILLIFFFIALVFFLYRRRKGSRKDVTLRKLDIKVETVNREPLTMHSDREDDTASVSTATRVMKAIYSSFMDDVDLKQDLRCDTIDTREEYEMKDPTNGYYNVRAHEDRPSSRAVLYADYRAPGPARFDGRPSSRLSHSSGYAQLNTYSRGPASDYGPEPTPPGPAAPAGTDTTSQLSYENYEKFNSHPFPGAAGYPTYRLGYPQAPPSGLERTPYEAYDPIGKYATATRFSYTSQHSDYGQRFQQRMQTHV

SEQ ID NO: 361 - DNA, 2128 bp, Homo sapiens
  CDS (31)..(2118)
caatggaccaaggacgggctggccctgggcatgggccagggcctcaaagcctggccacggtaccgggttgtgggctccgcagacgctgggcagtacaacctggagatcacagatgctgagctctctgacgacgcctcttacgagtgccaggccacggaggccgccctgcgctctcggcgggccaaactcaccgtgctcatccccccagaggacaccaggattgacggaggccctgtgattctactgcaggcaggcaccccccacaacctcacatgccgggccttcaatgcgaagcctgctgccaccatcatctggttccgggacgggacgcagcaggagggcgctgtggccagcacggaattgctgaaggatgggaagagggagaccaccgtgagccaactgcttattaaccccacggacctggacatagggcgtgtcttcacttgccgaagcatgaacgaagccatccctagtggcaaggagacttccatcgagctggatgtgcaccaccctcctacagtgaccctgtccattgagccacagacggtgcaggagggtgagcgtgttgtctttacctgccaggccacagccaaccccgagatcttggactacaggtgggccaaagggggtttcttgattgaagacgcccacgagagtcgctatgagacaaatgtggattattcctttttcacggagcctgtgtcttgtgaggttcacaacaaagtgggaagcaccaatgtcagcactttagtaaatgtccactttgctccccggattgtagttgaccccaaacccacaaccacagacattggctctgatgtgacccttacctgtgtctgggttgggaatccccccctcactctcacctggaccaaaaaggactcaaatatggtcctgagtaacagcaaccagctgctgctgaagtcggtgactcaggcagacgctggcacctacacctgccgggccatcgtgcctcgaatcggagtggctgagcgggaggtgccgctctatgtgaacgggccccccatcatctccagtgaggcagtgcagtatgctgtgaggggtgacggtggcaaggtggagtgtttcattgggagcacaccacccccagaccgcatagcatgggcctggaaggagaacttcttggaggtggggaccctggaacgctatacagtggagaggaccaactcaggcagtggggtgctatccacgctcaccatcaacaatgtcatggaggccgactttcagactcactacaactgcaccgcctggaacagcttcgggccaggcacagccatcatccagctggaagagcgagaggtgttacctgtgggcatcatagctggggccaccatcggcgcgagcatcctgctcatcttcttcttcatcgccttggtattcttcctctaccggcgccacaaaggcagtcgcaaagacgtgaccctgaggaagctggatatcaaggtggagacagtgaaccgagagccacttacgatgcattctgaccgggaggatgacaccgccagcgtctccacagcaacccgggtcatgaaggccatctactcgtcgtttatggatgatgtggatctgaagcaggacctgcgctgcgacaccatcgacacccgggaggagtatgagatgaaggaccccaccaatggctactacaacgtgcgtgcccatgaagaccgcccgtcttccagggcagtgctctatgctgactaccgtgcccctggccctgcccgcttcgacggccgcccctcatcccgtctctcccactccagcggctatgcccagctcaacacctatagccggggccctgcctctgactatggccctgagcccacaccccctggccctgctgccccagctggcactgacacaaccagccagctgtcctacgagaactatgagaagttcaactcccatcccttccctggggcagctgggtaccccacctaccgactgggctacccccaggccccaccctctggcctggagcggaccccatatgaggcgtatgaccccattggcaagtacgccacagccactcgattctcctacacctcccagcactcggactacggccagcgattccagcagcgcatgcagactcacgtgtaggggccag

SEQ ID NO: 362 - protein, 696 aa, Homo sapiens
MGQGLKAWPRYRVVGSADAGQYNLEITDAELSDDASYECQATEAALRSRRAKLTVLIPPEDTRIDGGPVILLQAGTPHNLTCRAFNAKPAATIIWFRDGTQQEGAVASTELLKDGKRETTVSQLLINPTDLDIGRVFTCRSMNEAIPSGKETSIELDVHHPPTVTLSIEPQTVQEGERVVFTCQATANPEILDYRWAKGGFLIEDAHESRYETNVDYSFFTEPVSCEVHNKVGSTNVSTLVNVHFAPRIVVDPKPTTTDIGSDVTLTCVWVGNPPLTLTWTKKDSNMVLSNSNQLLLKSVTQADAGTYTCRAIVPRIGVAEREVPLYVNGPPIISSEAVQYAVRGDGGKVECFIGSTPPPDRIAWAWKENFLEVGTLERYTVERTNSGSGVLSTLTINNVMEADFQTHYNCTAWNSFGPGTAIIQLEEREVLPVGIIAGATIGASILLIFFFIALVFFLYRRHKGSRKDVTLRKLDIKVETVNREPLTMHSDREDDTASVSTATRVMKAIYSSFMDDVDLKQDLRCDTIDTREEYEMKDPTNGYYNVRAHEDRPSSRAVLYADYRAPGPARFDGRPSSRLSHSSGYAQLNTYSRGPASDYGPEPTPPGPAAPAGTDTTSQLSYENYEKFNSHPFPGAAGYPTYRLGYPQAPPSGLERTPYEAYDPIGKYATATRFSYTSQHSDYGQRFQQRMQTHV

SEQ ID NO: 363 - DNA, 2128 bp, Homo sapiens
  CDS (31)..(2118)
caatggaccaaggacgggctggccctgggcatgggccagggcctcaaagcctggccacggtaccgggttgtgggctccgcagacgctgggcagtacaacctggagatcacagatgctgagctctctgacgacgcctcttacgagtgccaggccacggaggccgccctgcgctctcggcgggccaaactcaccgtgctcatccccccagaggacaccaggattgacggaggccctgtgattctactgcaggcaggcaccccccacaacctcacatgccgggccttcaatgcgaagcctgctgccaccatcatctggttccgggacgggacgcagcaggagggcgctgtggccagcacggaattgctgaaggatgggaagagggagaccaccgtgagccaactgcttattaaccccacggacctggacatagggcgtgtcttcacttgccgaagcatgaacgaagccatccctagtggcaaggagacttccatcgagctggatgtgcaccaccctcctacagtgaccctgtccattgagccacagacggtgcaggagggtgagcgtgttgtctttacctgccaggccacagccaaccccgagatcttggactacaggtgggccaaagggggtttcttgattgaagacgcccacgagagtcgctatgagacaaatgtggattattcctttttcacggagcctgtgtcttgtgaggttcacaacaaagtgggaagcaccaatgtcagcactttagtaaatgtccactttgctccccggattgtagttgaccccaaacccacaaccacagacattggctctgatgtgacccttacctgtgtctgggttgggaatccccccctcactctcacctggaccaaaaaggactcaaatatggtcctgagtaacagcaaccagctgctgctgaagtcggtgactcaggcagacgctggcacctacacctgccgggccatcgtgcctcgaatcggagtggctgagcgggaggtgccgctctatgtgaacgggccccccatcatctccagtgaggcagtgcagtatgctgtgaggggtgacggtggcaaggtggagtgtttcattgggagcacaccacccccagaccgcatagcatgggcctggaaggagaacttcttggaggtggggaccctggaacgctatacagtggagaggaccaactcaggcagtggggtgctatccacgctcaccatcaacaatgtcatggaggccgactttcagactcactacaactgcaccgcctggaacagcttcgggccaggcacagccatcatccagctggaagagcgagaggtgttacctgtgggcatcatagctggggccaccatcggcgcgagcatcctgctcatcttcttcttcatcgccttggtattcttcctctaccggcgccgcagaggcagtcgcaaagacgtgaccctgaggaagctggatatcaaggtggagacagtgaaccgagagccacttacgatgcattctgaccgggaggatgacaccgccagcgtctccacagcaacccgggtcatgaaggccatctactcgtcgtttatggatgatgtggatctgaagcaggacctgcgctgcgacaccatcgacacccgggaggagtatgagatgaaggaccccaccaatggctactacaacgtgcgtgcccatgaagaccgcccgtcttccagggcagtgctctatgctgactaccgtgcccctggccctgcccgcttcgacggccgcccctcatcccgtctctcccactccagcggctatgcccagctcaacacctatagccggggccctgcctctgactatggccctgagcccacaccccctggccctgctgccccagctggcactgacacaaccagccagctgtcctacgagaactatgagaagttcaactcccatcccttccctggggcagctgggtaccccacctaccgactgggctacccccaggccccaccctctggcctggagcggaccccatatgaggcgtatgaccccattggcaagtacgccacagccactcgattctcctacacctcccagcactcggactacggccagcgattccagcagcgcatgcagactcacgtgtaggggccag

SEQ ID NO: 364 - protein, 696 aa, Homo sapiens
MGQGLKAWPRYRVVGSADAGQYNLEITDAELSDDASYECQATEAALRSRRAKLTVLIPPEDTRIDGGPVILLQAGTPHNLTCRAFNAKPAATIIWFRDGTQQEGAVASTELLKDGKRETTVSQLLINPTDLDIGRVFTCRSMNEAIPSGKETSIELDVHHPPTVTLSIEPQTVQEGERVVFTCQATANPEILDYRWAKGGFLIEDAHESRYETNVDYSFFTEPVSCEVHNKVGSTNVSTLVNVHFAPRIVVDPKPTTTDIGSDVTLTCVWVGNPPLTLTWTKKDSNMVLSNSNQLLLKSVTQADAGTYTCRAIVPRIGVAEREVPLYVNGPPIISSEAVQYAVRGDGGKVECFIGSTPPPDRIAWAWKENFLEVGTLERYTVERTNSGSGVLSTLTINNVMEADFQTHYNCTAWNSFGPGTAIIQLEEREVLPVGIIAGATIGASILLIFFFIALVFFLYRRRRGSRKDVTLRKLDIKVETVNREPLTMHSDREDDTASVSTATRVMKAIYSSFMDDVDLKQDLRCDTIDTREEYEMKDPTNGYYNVRAHEDRPSSRAVLYADYRAPGPARFDGRPSSRLSHSSGYAQLNTYSRGPASDYGPEPTPPGPAAPAGTDTTSQLSYENYEKFNSHPFPGAAGYPTYRLGYPQAPPSGLERTPYEAYDPIGKYATATRFSYTSQHSDYGQRFQQRMQTHV

SEQ ID NO: 365 - DNA, 2128 bp, Homo sapiens
  CDS (31)..(2118)
caatggaccaaggacgggctggccctgggcatgggccagggcctcaaagcctggccacggtaccgggttgtgggctccgcagacgctgggcagtacaacctggagatcacagatgctgagctctctgacgacgcctcttacgagtgccaggccacggaggccgccctgcgctctcggcgggccaaactcaccgtgctcatccccccagaggacaccaggattgacggaggccctgtgattctactgcaggcaggcaccccccacaacctcacatgccgggccttcaatgcgaagcctgctgccaccatcatctggttccgggacgggacgcagcaggagggcgctgtggccagcacggaattgctgaaggatgggaagagggagaccaccgtgagccaactgcttattaaccccacggacctggacatagggcgtgtcttcacttgccgaagcatgaacgaagccatccctagtggcaaggagacttccatcgagctggatgtgcaccaccctcctacagtgaccctgtccattgagccacagacggtgcaggagggtgagcgtgttgtctttacctgccaggccacagccaaccccgagatcttggactacaggtgggccaaagggggtttcttgattgaagacgcccacgagagtcgctatgagacaaatgtggattattcctttttcacggagcctgtgtcttgtgaggttcacaacaaagtgggaagcaccaatgtcagcactttagtaaatgtccactttgctccccggattgtagttgaccccaaacccacaaccacagacattggctctgatgtgacccttacctgtgtctgggttgggaatccccccctcactctcacctggaccaaaaaggactcaaatatggtcctgagtaacagcaaccagctgctgctgaagtcggtgactcaggcagacgctggcacctacacctgccgggccatcgtgcctcgaatcggagtggctgagcgggaggtgccgctctatgtgaacgggccccccatcatctccagtgaggcagtgcagtatgctgtgaggggtgacggtggcaaggtggagtgtttcattgggagcacaccacccccagaccgcatagcatgggcctggaaggagaacttcttggaggtggggaccctggaacgctatacagtggagaggaccaactcaggcagtggggtgctatccacgctcaccatcaacaatgtcatggaggccgactttcagactcactacaactgcaccgcctggaacagcttcgggccaggcacagccatcatccagctggaagagcgagaggtgttacctgtgggcatcatagctggggccaccatcggcgcgagcatcctgctcatcttcttcttcatcgccttggtattcttcctctaccggcgccgcaaaggctgtcgcaaagacgtgaccctgaggaagctggatatcaaggtggagacagtgaaccgagagccacttacgatgcattctgaccgggaggatgacaccgccagcgtctccacagcaacccgggtcatgaaggccatctactcgtcgtttatggatgatgtggatctgaagcaggacctgcgctgcgacaccatcgacacccgggaggagtatgagatgaaggaccccaccaatggctactacaacgtgcgtgcccatgaagaccgcccgtcttccagggcagtgctctatgctgactaccgtgcccctggccctgcccgcttcgacggccgcccctcatcccgtctctcccactccagcggctatgcccagctcaacacctatagccggggccctgcctctgactatggccctgagcccacaccccctggccctgctgccccagctggcactgacacaaccagccagctgtcctacgagaactatgagaagttcaactcccatcccttccctggggcagctgggtaccccacctaccgactgggctacccccaggccccaccctctggcctggagcggaccccatatgaggcgtatgaccccattggcaagtacgccacagccactcgattctcctacacctcccagcactcggactacggccagcgattccagcagcgcatgcagactcacgtgtaggggccag

SEQ ID NO: 366 - protein, 696 aa, Homo sapiens
MGQGLKAWPRYRVVGSADAGQYNLEITDAELSDDASYECQATEAALRSRRAKLTVLIPPEDTRIDGGPVILLQAGTPHNLTCRAFNAKPAATIIWFRDGTQQEGAVASTELLKDGKRETTVSQLLINPTDLDIGRVFTCRSMNEAIPSGKETSIELDVHHPPTVTLSIEPQTVQEGERVVFTCQATANPEILDYRWAKGGFLIEDAHESRYETNVDYSFFTEPVSCEVHNKVGSTNVSTLVNVHFAPRIVVDPKPTTTDIGSDVTLTCVWVGNPPLTLTWTKKDSNMVLSNSNQLLLKSVTQADAGTYTCRAIVPRIGVAEREVPLYVNGPPIISSEAVQYAVRGDGGKVECFIGSTPPPDRIAWAWKENFLEVGTLERYTVERTNSGSGVLSTLTINNVMEADFQTHYNCTAWNSFGPGTAIIQLEEREVLPVGIIAGATIGASILLIFFFIALVFFLYRRRKGCRKDVTLRKLDIKVETVNREPLTMHSDREDDTASVSTATRVMKAIYSSFMDDVDLKQDLRCDTIDTREEYEMKDPTNGYYNVRAHEDRPSSRAVLYADYRAPGPARFDGRPSSRLSHSSGYAQLNTYSRGPASDYGPEPTPPGPAAPAGTDTTSQLSYENYEKFNSHPFPGAAGYPTYRLGYPQAPPSGLERTPYEAYDPIGKYATATRFSYTSQHSDYGQRFQQRMQTHV

SEQ ID NO: 367 - DNA, 2128 bp, Homo sapiens
  CDS (31)..(2118)
caatggaccaaggacgggctggccctgggcatgggccagggcctcaaagcctggccacggtaccgggttgtgggctccgcagacgctgggcagtacaacctggagatcacagatgctgagctctctgacgacgcctcttacgagtgccaggccacggaggccgccctgcgctctcggcgggccaaactcaccgtgctcatccccccagaggacaccaggattgacggaggccctgtgattctactgcaggcaggcaccccccacaacctcacatgccgggccttcaatgcgaagcctgctgccaccatcatctggttccgggacgggacgcagcaggagggcgctgtggccagcacggaattgctgaaggatgggaagagggagaccaccgtgagccaactgcttattaaccccacggacctggacatagggcgtgtcttcacttgccgaagcatgaacgaagccatccctagtggcaaggagacttccatcgagctggatgtgcaccaccctcctacagtgaccctgtccattgagccacagacggtgcaggagggtgagcgtgttgtctttacctgccaggccacagccaaccccgagatcttggactacaggtgggccaaagggggtttcttgattgaagacgcccacgagagtcgctatgagacaaatgtggattattcctttttcacggagcctgtgtcttgtgaggttcacaacaaagtgggaagcaccaatgtcagcactttagtaaatgtccactttgctccccggattgtagttgaccccaaacccacaaccacagacattggctctgatgtgacccttacctgtgtctgggttgggaatccccccctcactctcacctggaccaaaaaggactcaaatatggtcctgagtaacagcaaccagctgctgctgaagtcggtgactcaggcagacgctggcacctacacctgccgggccatcgtgcctcgaatcggagtggctgagcgggaggtgccgctctatgtgaacgggccccccatcatctccagtgaggcagtgcagtatgctgtgaggggtgacggtggcaaggtggagtgtttcattgggagcacaccacccccagaccgcatagcatgggcctggaaggagaacttcttggaggtggggaccctggaacgctatacagtggagaggaccaactcaggcagtggggtgctatccacgctcaccatcaacaatgtcatggaggccgactttcagactcactacaactgcaccgcctggaacagcttcgggccaggcacagccatcatccagctggaagagcgagaggtgttacctgtgggcatcatagctggggccaccatcggcgcgagcatcctgctcatcttcttcttcatcgccttggtattcttcctctaccggcgccgcaaaggcagtcgcaaaggcgtgaccctgaggaagctggatatcaaggtggagacagtgaaccgagagccacttacgatgcattctgaccgggaggatgacaccgccagcgtctccacagcaacccgggtcatgaaggccatctactcgtcgtttatggatgatgtggatctgaagcaggacctgcgctgcgacaccatcgacacccgggaggagtatgagatgaaggaccccaccaatggctactacaacgtgcgtgcccatgaagaccgcccgtcttccagggcagtgctctatgctgactaccgtgcccctggccctgcccgcttcgacggccgcccctcatcccgtctctcccactccagcggctatgcccagctcaacacctatagccggggccctgcctctgactatggccctgagcccacaccccctggccctgctgccccagctggcactgacacaaccagccagctgtcctacgagaactatgagaagttcaactcccatcccttccctggggcagctgggtaccccacctaccgactgggctacccccaggccccaccctctggcctggagcggaccccatatgaggcgtatgaccccattggcaagtacgccacagccactcgattctcctacacctcccagcactcggactacggccagcgattccagcagcgcatgcagactcacgtgtaggggccag

SEQ ID NO: 368 - protein, 696 aa, Homo sapiens
MGQGLKAWPRYRVVGSADAGQYNLEITDAELSDDASYECQATEAALRSRRAKLTVLIPPEDTRIDGGPVILLQAGTPHNLTCRAFNAKPAATIIWFRDGTQQEGAVASTELLKDGKRETTVSQLLINPTDLDIGRVFTCRSMNEAIPSGKETSIELDVHHPPTVTLSIEPQTVQEGERVVFTCQATANPEILDYRWAKGGFLIEDAHESRYETNVDYSFFTEPVSCEVHNKVGSTNVSTLVNVHFAPRIVVDPKPTTTDIGSDVTLTCVWVGNPPLTLTWTKKDSNMVLSNSNQLLLKSVTQADAGTYTCRAIVPRIGVAEREVPLYVNGPPIISSEAVQYAVRGDGGKVECFIGSTPPPDRIAWAWKENFLEVGTLERYTVERTNSGSGVLSTLTINNVMEADFQTHYNCTAWNSFGPGTAIIQLEEREVLPVGIIAGATIGASILLIFFFIALVFFLYRRRKGSRKGVTLRKLDIKVETVNREPLTMHSDREDDTASVSTATRVMKAIYSSFMDDVDLKQDLRCDTIDTREEYEMKDPTNGYYNVRAHEDRPSSRAVLYADYRAPGPARFDGRPSSRLSHSSGYAQLNTYSRGPASDYGPEPTPPGPAAPAGTDTTSQLSYENYEKFNSHPFPGAAGYPTYRLGYPQAPPSGLERTPYEAYDPIGKYATATRFSYTSQHSDYGQRFQQRMQTHV

SEQ ID NO: 369 - DNA, 1826 bp, Homo sapiens
  CDS (167)..(1720)
aggactccagcgtgcccagtgacataaacccactctgcacataccagttgctctgtcccagctgtgctgcggtggtgctgggacaaaagaagcatgagacgcagactctgtccctcaaagaactcccagtgcaggacaatgtggtgcccaaggaagacccagggacatgggagtggaggacagtcaaagaagggatcctggaagaggtctggcatcctgcacttgctgccctctgacacctgggaagatggccggcccgtggaccttcacccttctctgtggtttgctggcagccaccttgatccaagccaccctcagtcccactgcagttctcatcctcggcccaaaagtcatcaaagaaaagctgacacaggagctgaaggaccacaacgccaccagcatcctgcagcagctgccgctgctcagtgccatgcgggaaaagccagccggaggcatccctgtgctgggcagcctggtgaacaccgtcctgaagcacatcatctggctgaaggtcatcacagctaacatcctccagctgcaggtgaagccctcggccaatgaccaggagctgctagtcaagatccccctggacatggtggctggattcaacacgcccctggtcaagaccatcgtggagttccacatgacgactgaggcccaagccaccatccgcatggacaccagtgcaagtggccccacccgcctggtcctcagtgactgtgccaccagccatgggagcctgcgcatccaactgctgcataagctctccttcctggtgaacgccttagctaagcaggtcatgaacctcctagtgccatccctgcccaatctagtgaaaaaccagctgtgtcccgtgatcgaggcttccttcaatggcatgtatgcagacctcctgcagctggtgaaggtgcccatttccctcagcattgaccgtctggagtttgaccttctgtatcctgccatcaagggtgacaccattcagctctacctgggggccaagttgttggactcacagggaaaggtgaccaagtggttcaataactctgcagcttccctgacaatgcccaccctggacaacatcccgttcagcctcatcgtgagtcaggacgtggtgaaagctgcagtggctgctgtgctctctccagaagaattcatggtcctgttggactctgtgcttcctgagagtgcccatcggctgaagtcaagcatcgggctgatcaatgaaaaggctgcagataagctgggatctacccagatcgtgaagatcctaactcaggacactcccgagttttttatagaccaaggccatgccaaggtggcccaactgatcgtgctggaagtgtttccctccagtgaagccctccgccctttgttcaccctgggcatcgaagccagctcggaagctcagttttacaccaaaggtgaccaacttatactcaacttgaataacatcagctctgatcggatccagctgatgaactctgggattggctggttccaatgccccttctctctctcacagcctgatgttctgaaaaacatcatcactgagatcatccactccatcctgctgccgaaccagaatggcaaattaagatctggggtcccagtgtcattggtgaaggccttgggattcgaggcagctgagtcctcactgaccaaggatgcccttgtgcttactccagcctccttgtggaaacccagctctcctgtctcccagtgaagacttggatggcagccatcagggaaggctgggtcccagctgggagtatgggtgtgagctctatagaccatccctctctgcaatcaataaacacttgcctgtg

SEQ ID NO: 370 - protein, 518 aa, Homo sapiens
MGVEDSQRRDPGRGLASCTCCPLTPGKMAGPWTFTLLCGLLAATLIQATLSPTAVLILGPKVIKEKLTQELKDHNATSILQQLPLLSAMREKPAGGIPVLGSLVNTVLKHIIWLKVITANILQLQVKPSANDQELLVKIPLDMVAGFNTPLVKTIVEFHMTTEAQATIRMDTSASGPTRLVLSDCATSHGSLRIQLLHKLSFLVNALAKQVMNLLVPSLPNLVKNQLCPVIEASFNGMYADLLQLVKVPISLSIDRLEFDLLYPAIKGDTIQLYLGAKLLDSQGKVTKWFNNSAASLTMPTLDNIPFSLIVSQDVVKAAVAAVLSPEEFMVLLDSVLPESAHRLKSSIGLINEKAADKLGSTQIVKILTQDTPEFFIDQGHAKVAQLIVLEVFPSSEALRPLFTLGIEASSEAQFYTKGDQLILNLNNISSDRIQLMNSGIGWFQCPFSLSQPDVLKNIITEIIHSILLPNQNGKLRSGVPVSLVKALGFEAAESSLTKDALVLTPASLWKPSSPVSQ

SEQ ID NO: 371 - DNA, 1452 bp, Homo sapiens
  CDS (44)..(1345)
aggtctgccatcctgcacttgctgccctctgacacctgggaagatggccggcccgtggaccttcacccctctctgtggtttgctggcagccaccttgatccaagccaccctcagtcccactgcagttctcatcctcggcccaaaagtcatcaaagaaaagctgacacaggagctgaaggaccacaacgccaccagcatcctgcagcagctgccgctgctcagtgccatgcgggaaaagccagccggaggcatccctgtgctgggcagcctggtgaacaccgtcctgaagcacgtcatctggctgaaggtcatcacagctaacatcctccagctgcaggtgaagccctcggccaatgaccaggagctgctagtcaagatccccctggacatggtggctggattcaacacgctctccttcctggtgaacgccttagctaagcaggtcatgaacctcctagtgccatccctgcccaatctagtgaaaaaccagctgtgtcccgtgatcgaggcttccttcaatggcatgtatgcagacctcctgcagctggtgaaggtgcccatttccctcagcattgaccgtctggagtttgaccttctgtatcctgccatcaagggtgacaccattcagctctacctgggggccaagttgttggactcacagggaaaggtgaccaagtggttcaataactctgcagcttccctgacaatgcccaccctggacaacatcccgttcagcctcatcgtgagtcaggacgtggtgaaagctgcagtggctgctgtgctctctccagaagaattcatggtcctgttggactctgtgcttcctgagagtgcccatcggctgaagtcaagcatcgggctgatcaatgaaaaggctgcagataagctgggatctacccagatcgtgaagatcctaactcaggacactcccgagttttttatagaccaaggccatgccaaggtggcccaactgatcgtgctggaagtgtttccctccagtgaagccctccgccctttgttcaccctgggcatcgaagccagctcggaagctcagttttacaccaaaggtgaccaacttatactcaacttgaataacatcagctctgatcggatccagctgatgaactctgggattggctggttccaacctgatgttctgaaaaacatcatcactgagatcatccactccatcctgctgccgaaccagaatggcaaattaagatctggggtcccagtgtcattggtgaaggccttgggattcgaggcagctgagtcctcactgagcaaggatgcccttgtgcttactccagcctccttgtggaaacccacctctcctgtctcccagtgaagacttggatggcagccatcagggaaggctgggtcccagctgggagtatgggtgtgagctctatagaccatccctctctgcaatcaataaacacttgcctgtga

SEQ ID NO: 372 - protein, 434 aa, Homo sapiens
MAGPWTFTPLCGLLAATLIQATLSPTAVLILGPKVIKEKLTQELKDHNATSILQQLPLLSAMREKPAGGIPVLGSLVNTVLKHVIWLKVITANILQLQVKPSANDQELLVKIPLDMVAGFNTLSFLVNALAKQVMNLLVPSLPNLVKNQLCPVIEASFNGMYADLLQLVKVPISLSIDRLEFDLLYPAIKGDTIQLYLGAKLLDSQGKVTKWFNNSAASLTMPTLDNIPFSLIVSQDVVKAAVAAVLSPEEFMVLLDSVLPESAHRLKSSIGLINEKAADKLGSTQIVKILTQDTPEFFIDQGHAKVAQLIVLEVFPSSEALRPLFTLGIEASSEAQFYTKGDQLILNLNNISSDRIQLMNSGIGWFQPDVLKNIITEIIHSILLPNQNGKLRSGVPVSLVKALGFEAAESSLSKDALVLTPASLWKPTSPVSQ

SEQ ID NO: 373 - DNA, 1580 bp, Homo sapiens
  CDS (77)..(1474)
agagaggagcgggccgaggactccagcgtgcccaggtctggcatcctgcacttgctgccctctgacacctgggaagatggccggcccgtggaccttcacccttctctgtggtttgctggcagccaccttgatccaagccaccctcagtcccactgcagttctcatcctcggcccaaaagtcatcaaagaaaagctgacacaggagctgaaggaccacaacgccaccagcatcctgcagcagctgccgctgctcagtgccatgcgggaaaagccagccggaggcatccctgtgctgggcagcctggtgaacaccgtcctgaagcacgtcatctggctgaaggtcatcacagctaacatcctccagctgcaggtgaagccctcggccaatgaccaggagctgctagtcaagatccccctggacatggtggctggattcaacacgcccctggtcaagaccatcgtggagttccacatgacgactgaggcccaagccaccatccgcatggacaccagtgcaagtggccccacccgcctggtcctcagtgactgtgccaccagccatgggagcctgcgcatccaactgctgcataagctctccttcctggtgaacgccttagctaagcaggtcatgaacctcctagtgccatccctgcccaatctagtgaaaaaccagctggtgaaggtgcccatttccctcagcattgaccgtctggagtttgaccttctgtatcctgccatcaagggtgacaccattcagctctacctgggggccaagttgttggactcacagggaaaggtgaccaagtggttcaataactctgcagcttccctgacaatgcccaccctggacaacatcccgttcagcctcatcgtgagtcaggacgtggtgaaagctgcagtggctgctgtgctctctccagaagaattcatggtcctgttggactctgtgcttcctgagagtgcccatcggctgaagtcaagcatcgggctgatcaatgaaaaggctgcagataagctgggatctacccagatcgtgaagatcctaactcaggacactcccgagttttttatagaccaaggccatgccaaggtggcccaactgatcgtgctggaagtgtttccctccagtgaagccctccgccctttgttcaccctgggcatcgaagccagctcggaagctcagttttacaccaaaggtgaccaacttatactcaacttgaataacatcagctctgatcggatccagctgatgaactctgggattggctggttccaacctgatgttctgaaaaacatcatcactgagatcatccactccatcctgctgccgaaccagaatggcaaattaagatctggggtcccagtgtcattggtgaaggccttgggattcgaggcagctgagtcctcactgagcaaggatgcccttgtgcttactccagcctccttgtggaaacccacctctcctgtctcccagtgaagacttggatggcagccatcagggaaggctgggtcccagctgggagtatgggtgtgagctctatagaccatccctctctgcaatcaataaacacttgcctgtg

SEQ ID NO: 374 - protein, 466 aa, Homo sapiens
MAGPWTFTLLCGLLAATLIQATLSPTAVLILGPKVIKEKLTQELKDHNATSILQQLPLLSAMREKPAGGIPVLGSLVNTVLKHVIWLKVITANILQLQVKPSANDQELLVKIPLDMVAGFNTPLVKTIVEFHMTTEAQATIRMDTSASGPTRLVLSDCATSHGSLRIQLLHKLSFLVNALAKQVMNLLVPSLPNLVKNQLVKVPISLSIDRLEFDLLYPAIKGDTIQLYLGAKLLDSQGKVTKWFNNSAASLTMPTLDNIPFSLIVSQDVVKAAVAAVLSPEEFMVLLDSVLPESAHRLKSSIGLINEKAADKLGSTQIVKILTQDTPEFFIDQGHAKVAQLIVLEVFPSSEALRPLFTLGIEASSEAQFYTKGDQLILNLNNISSDRIQLMNSGIGWFQPDVLKNIITEIIHSILLPNQNGKLRSGVPVSLVKALGFEAAESSLSKDALVLTPASLWKPTSPVSQ

SEQ ID NO: 375 - DNA, 963 bp, Homo sapiens
  CDS (1)..(960)
atggccggcccgtggaccttcacccttctctgtggtttgctggcagccaccttgatccaagccaccctcagtcccactgcagttctcatcctcggcccaaaagtcatcaaagaaagtctgacacaggagctgaaggaccacaacgccaccagcatcctgcagcagctgccgctgctcagtgccatgcgggaaaagccagccggaggcatccctgtgctgggcagcctggtgaacaccgtcctgaagcacatcaccccatccaggctgaaggtcatcacagctaacatcctccagctgcaggtgaagccctcggccaatgaccaggagctgctagtcaagatccccctggacatggtggctggattcaacacgcccctggtcaagaccatcgtggagttccacatgacgactgaggcccaagccaccatccgcatggacaccagtgcaagtggccccacccgcctggtcctcagtgactgtgccaccagccatgggagcctgcgcatccaactgctgcataagctctccttcctggtgaacgccttagctaagcaggtcatgaacctcctagtgccatccctgcccaatctagtgaaaaaccagctgtgtcccgtgatcgaggcttccttcaatggcatgtatgcagacctcctgcagctggtgaagggtaggtgctctgctctctctcccactttttcctttactacggagctggcctccagacccggaaaggtgaccaagtggttcaataactctgcagcttccctgacaatgcccaccctggacaacatcccgttcagcctcatcgtgagtcaggacgtggtgaaagctgcagtggctgctgtgctctctccagaagaattcatggtcctgttggactctgtggtaaacctcagcacaaggcagagaatagggccgcccaggccacatcataggaatttcctgaacacagggtgcccctaa

SEQ ID NO: 376 - protein, 320 aa, Homo sapiens
MAGPWTFTLLCGLLAATLIQATLSPTAVLILGPKVIKESLTQELKDHNATSILQQLPLLSAMREKPAGGIPVLGSLVNTVLKHITPSRLKVITANILQLQVKPSANDQELLVKIPLDMVAGFNTPLVKTIVEFHMTTEAQATIRMDTSASGPTRLVLSDCATSHGSLRIQLLHKLSFLVNALAKQVMNLLVPSLPNLVKNQLCPVIEASFNGMYADLLQLVKGRCSALSPTFSFTTELASRPGKVTKWFNNSAASLTMPTLDNIPFSLIVSQDVVKAAVAAVLSPEEFMVLLDSVVNLSTRQRIGPPRPHHRNFLNTGCP

SEQ ID NO: 377 - DNA, 1024 bp, Homo sapiens
  CDS (2)..(1024)
caccggatccaccatggccggcccgtggaccttcacccttctctgtggtttgctggcagccaccttgatccaagccaccctcagtcccactgcagttctcatcctcggcccaaaagtcatcaaagaaaagctgacacaggagctgaaggaccacaacgccaccagcatcctgcagcagctgccgctgctcagtgccatgcgggaaaagccagccggaggcatccctgtgctgggcagcctggtgaacaccgtcctgaagcacgtcatctggctgaaggtcatcacagctaacatcctccagctgcaggtgaagccctcggccaatgaccaggagctgctagtcaagatccccctggacatggtggctggattcaacacgcccctggtcaagaccatcgtggagttccacatgacgactgaggcccaagccaccatccgcatggacaccagtgcaagtggccccacccgcctggtcctcagtgactgtgccaccagccatgggagcctgcgcatccaactgctgcataagctctccttcctggtgaacgccttagctaagcaggtcatgaacctcctagtgccatccctgcccaatctagtgaaaaaccagctgtgtcccgtgatcgaggcttccttcaatggcatgtatgcagacctcctgcagctggtgaaggtgcccatttccctcagcattgaccgtctggagtttgaccttctgtatcctgccatcaagggtgacaccattcagctctacctgggggccaagttgttggactcacagggaaaggtgaccaagtggttcaataactctgcagcttccctgacaatgcccaccctggacaacatcccgttcagcctcatcgtgagtcaggacgtggtgaaagctgcagtggctgctgtgctctctccagaagaattcatggtcctgttggactctgtggtaaacctcagcacaaggcagagaatagggccgcccaggccacatcataggaatttcctgaacacagggtgccccctcgagggc

SEQ ID NO: 378 - protein, 341 aa, Homo sapiens
TGSTMAGPWTFTLLCGLLAATLIQATLSPTAVLILGPKVIKEKLTQELKDHNATSILQQLPLLSAMREKPAGGIPVLGSLVNTVLKHVIWLKVITANILQLQVKPSANDQELLVKIPLDMVAGFNTPLVKTIVEFHMTTEAQATIRMDTSASGPTRLVLSDCATSHGSLRIQLLHKLSFLVNALAKQVMNLLVPSLPNLVKNQLCPVIEASFNGMYADLLQLVKVPISLSIDRLEFDLLYPAIKGDTIQLYLGAKLLDSQGKVTKWFNNSAASLTMPTLDNIPFSLIVSQDVVKAAVAAVLSPEEFMVLLDSVVNLSTRQRIGPPRPHHRNFLNTGCPLEG

SEQ ID NO: 379 - DNA, 946 bp, Homo sapiens
  CDS (2)..(946)
caccggatcccccactgcagttctcatcctcggcccaaaagtcatcaaagaaaagctgacacaggagctgaaggaccacaacgccaccagcatcctgcagcagctgccgctgctcagtgccatgcgggaaaagccagccggaggcatccctgtgctgggcagcctggtgaacaccgtcctgaagcacgtcatctggctgaaggtcatcacagctaacatcctccagctgcaggtgaagccctcggccaatgaccaggagctgctagtcaagatccccctggacatggtggctggattcaacacgcccctggtcaagaccatcgtggagttccacatgacgactgaggcccaagccaccatccgcatggacaccagtgcaagtggccccacccgcctggtcctcagtgactgtgccaccagccatgggagcctgcgcatccaactgctgcataagctctccttcctggtgaacgccttagctaagcaggtcatgaacctcctagtgccatccctgcccaatctagtgaaaaaccagctgtgtcccgtgatcgaggcttccttcaatggcatgtatgcagacctcctgcagctggtgaaggtgcccatttccctcagcattgaccgtctggagtttgaccttctgtatcctgccatcaagggtgacaccattcagctctacctgggggccaagttgttggactcacagggaaaggtgaccaagtggttcaataactctgcagcttccctgacaatgcccaccctggacaacatcccgttcagcctcatcgtgagtcaggacgtggtgaaagctgcagtggctgctgtgctctctccagaagaattcatggtcctgttggactctgtggtaaacctcagcacaaggcagagaatagggccgcccaggccacatcataggaatttcctgaacacagggtgccccctcgag

SEQ ID NO: 380 - protein, 315 aa, Homo sapiens
TGSPTAVLILGPKVIKEKLTQELKDHNATSILQQLPLLSAMREKPAGGIPVLGSLVNTVLKHVIWLKVITANILQLQVKPSANDQELLVKIPLDMVAGFNTPLVKTIVEFHMTTEAQATIRMDTSASGPTRLVLSDCATSHGSLRIQLLHKLSFLVNALAKQVMNLLVPSLPNLVKNQLCPVIEASFNGMYADLLQLVKVPISLSIDRLEFDLLYPAIKGDTIQLYLGAKLLDSQGKVTKWFNNSAASLTMPTLDNIPFSLIVSQDVVKAAVAAVLSPEEFMVLLDSVVNLSTRQRIGPPRPHHRNFLNTGCPLE

SEQ ID NO: 381 - DNA, 1035 bp, Homo sapiens
  CDS (79)..(1032)
agagcgttgggtcacgtgaggactccagcgtgcccaggtctggcatcctgcacttactgccctctgacacctgggaagatggccggcccgtggaccttcacccttctctgtggtttgctggcagccaccttgatccaagccaccctcagtcccactgcagttctcatcctcggcccaaaagtcatcaaagaaaagctgacacaggagctgaaggaccacaacgccaccagcatcctgcagcagctgccgctgctcagtgccatgcgggaaaagccagccggaggcatccctgtgctgggcagcctggtgaacaccgtcctgaagcacatcatctggctgaaggtcatcacagctaacatcctccagctgcaggtgaagccctcggccaatgaccaggagctgctagtcaagatccccctggacatggtggctggattcaacacgcccctggtcaagaccatcgtggagttccacatgacgactgaggcccaagccaccatccgcatggacaccagtgcaagtggccccacccgcctggtcctcagtgactgtgccaccagccatgggagcctgcgcatccaactgctgcataagctctccttcctggtgaacgccttagctaagcaggtcatgaacctcctagtgccatccctgcccaatctagtgaaaaaccagctgtgtcccgtgatcgaggcttccttcaatggcatgtatgcagacctcctgcagctggtgaagggtaggtgctctgctctctctcccactttttcctttactacggagctggcctccagacccggaaaggtgaccaagtggttcaataactctgcagcttccctgacaatgcccaccctggacaacatcccgttcagcctcatcgtgagtcaggacgtggtgaaagctgcagtggctgctgtgctctctccagaagaattcatggtcctgttggactctgtggtaaacctcagcacaaggcagagaatagggccgcccaggccacatcataggaatttcctgaacacagggtgcccctaa

SEQ ID NO: 382 - protein, 318 aa, Homo sapiens
MAGPWTFTLLCGLLAATLIQATLSPTAVLILGPKVIKEKLTQELKDHNATSILQQLPLLSAMREKPAGGIPVLGSLVNTVLKHIIWLKVITANILQLQVKPSANDQELLVKIPLDMVAGFNTPLVKTIVEFHMTTEAQATIRMDTSASGPTRLVLSDCATSHGSLRIQLLHKLSFLVNALAKQVMNLLVPSLPNLVKNQLCPVIEASFNGMYADLLQLVKGRCSALSPTFSFTTELASRPGKVTKWFNNSAASLTMPTLDNIPFSLIVSQDVVKAAVAAVLSPEEFMVLLDSVVNLSTRQRIGPPRPHHRNFLNTGCP

SEQ ID NO: 383 - DNA, 1572 bp, Homo sapiens
  CDS (124)..(1440)
ggtgtgcaggatataaggttggacttccagacccactgcccgggagaggagaggagcgggccgaggactccagcgtgcccaggtctggcatcctgcacttgctgccctctgacacctgggaagatggccggcccgtggaccttcacccttctctgtggtttgctggcagccaccttgatccaagccaccctcagtcccactgcagttctcatcctcggcccaaaagtcatcaaagaaaagctgacacaggagctgaaggaccacaacgccaccagcatcctgcagcagctgccgctgctcagtgccatgcgggaaaagccagccggaggcatccctgtgctgggcagcctggtgaacaccgtcctgaagcacatcatctggctgaaggtcatcacagctaacatcctccagctgcaggtgaagccctcggccaatgaccaggagctgctagtcaagatccccctggacatggtggctggattcaacacgcccctggtcaagaccatcgtggagttccacatgacgactgaggcccaagccaccatccgcatggacaccagtgcaagtggccccacccgcctggtcctcagtgactgtgccaccagccatgggagcctgcgcatccaactgctgcataagctctccttcctggtgaacgccttagctaagcaggtcatgaacctcctagtgccatccctgcccaatctagtgaaaaaccagctgtgtcccgtgatcgaggcttccttcaatggcatgtatgcagacctcctgcagctggtgaaggtgcccatttccctcagcattgaccgtctggagtttgaccttctgtatcctgccatcaagggtgacaccattcagctctacctgggggccaagttgttggactcacagggaaaggtgaccaagtggttcaataactctgcagcttccctgacaatgcccaccctggacaacatcccgttcagcctcatcgtgagtcacccgttcagcctcatcgtgagtcaggacgtggtgaaagctgcagtggctgctgtgctctctccagaagaattcatggtcctgttggactctgtgcttcctgagagtgcccatcggctgaagtcaagcatcgggctgatcaatgaaaaggaagccagctcggaagctcagttttacaccaaaggtgaccaacttatactcaacttgaataacatcagctctgatcggatccagctgatgaactctgggattggctggttccaacctgatgttctgaaaaacatcatcactgagatcatccactccatcctgctgccgaaccagaatggcaaattaagatctggggtcccagtgtcattggtgaaggccttgggattcgaggcagctgagtcctcactgaccaaggatgcccttgtgcttactccagcctccttgtggaaacccagctctcctgtctcccagtgaagacttggatggcagccatcagggaaggctgggtcccagttgggagtatgggtgtgagctctatagaccatccctctctgcaatcaataaacacttgcctgtgaaaaaaaaaaaaaaataaaaaaaaaa

SEQ ID NO: 384 - protein, 439 aa, Homo sapiens
MAGPWTFTLLCGLLAATLIQATLSPTAVLILGPKVIKEKLTQELKDHNATSILQQLPLLSAMREKPAGGIPVLGSLVNTVLKHIIWLKVITANILQLQVKPSANDQELLVKIPLDMVAGFNTPLVKTIVEFHMTTEAQATIRMDTSASGPTRLVLSDCATSHGSLRIQLLHKLSFLVNALAKQVMNLLVPSLPNLVKNQLCPVIEASFNGMYADLLQLVKVPISLSIDRLEFDLLYPAIKGDTIQLYLGAKLLDSQGKVTKWFNNSAASLTMPTLDNIPFSLIVSHPFSLIVSQDVVKAAVAAVLSPEEFMVLLDSVLPESAHRLKSSIGLINEKEASSEAQFYTKGDQLILNLNNISSDRIQLMNSGIGWFQPDVLKNIITEIIHSILLPNQNGKLRSGVPVSLVKALGFEAAESSLTKDALVLTPASLWKPSSPVSQ

SEQ ID NO: 385 - DNA, 1023 bp, Homo sapiens
  CDS (19)..(1020)
cctctgacacctgggaagatggccggcccgtggaccttcacccttctctgtggtttgctggcagccaccttgatccaagccaccctcagtcccactgcagttctcatcctcggcccaaaagtcatcaaagaaaagctgacacaggagctgaaggaccacaacgccaccagcatcctgcagcagctgccgctgctcagtgccatgcgggaaaagccagccggaggcatccctgtgctgggcagcctggtgaacaccgtcctgaagcacgtcatctggctgaaggtcatcacagctaacatcctccagctgcaggtgaagccctcggccaatgaccaggagctgctagtcaagatccccctggacatggtggctggattcaacacgcccctggtcaagaccatcgtggagttccacatgacgactgaggcccaagccaccatccgcatggacaccagtgcaagtggccccacccgcctggtcctcagtgactgtgccaccagccatgggagcctgcgcatccaactgctgcataagctctccttcctggtgaacgccttagctaagcaggtcatgaacctcctagtgccatccctgcccaatctagtgaaaaaccagctgtgtcccgtgatcgaggcttccttcaatggcatgtatgcagacctcctgcagctggtgaaggtgcccatttccctcagcattgaccgtctggagtttgaccttctgtatcctgccatcaagggtgacaccattcagctctacctgggggccaagttgttggactcacagggaaaggtgaccaagtggttcaataactctgcagcttccctgacaatgcccaccctggacaacatcccgttcagcctcatcgtgagtcaggacgtggtgaaagctgcagtggctgctgtgctctctccagaagaattcatggtcctgttggactctgtggtaaacctcagcacaaggcagagaatagggccgcccaggccacatcataggaatttcctgaacacagggtgcccctaa

SEQ ID NO: 386 - protein, 334 aa, Homo sapiens
MAGPWTFTLLCGLLAATLIQATLSPTAVLILGPKVIKEKLTQELKDHNATSILQQLPLLSAMREKPAGGIPVLGSLVNTVLKHVIWLKVITANILQLQVKPSANDQELLVKIPLDMVAGFNTPLVKTIVEFHMTTEAQATIRMDTSASGPTRLVLSDCATSHGSLRIQLLHKLSFLVNALAKQVMNLLVPSLPNLVKNQLCPVIEASFNGMYADLLQLVKVPISLSIDRLEFDLLYPAIKGDTIQLYLGAKLLDSQGKVTKWFNNSAASLTMPTLDNIPFSLIVSQDVVKAAVAAVLSPEEFMVLLDSVVNLSTRQRIGPPRPHHRNFLNTGCP

SEQ ID NO: 387 - DNA, 1509 bp, Homo sapiens
  CDS (31)..(1479)
tgcacttgctgccctctgacacctgggaagatggccggcccgtggaccttcacccttctctgtggtttgctggcagccaccttgatccaagccaccctcagtcccactgcagttctcatcctcggcccaaaagtcatcaaagaaaagctgacacaggagctgaaggaccacaacgccaccagcatcctgcagcagctgccgctgctcagtgccatgcgggaaaagccagccggaggcatccctgtgctgggcagcctggtgaacaccgtcctgaagcacatcatctggctgaaggtcatcacagctaacatcctccagctgcaggtgaagccctcggccaatgaccaggagctgctagtcaagatccccctggacatggtggctggattcaacacgcccctggtcaagaccatcgtggagttccacatgacgactgaggcccaagccaccatccgcatggacaccagtgcaagtggccccacccgcctggtcctcagtgactgtgccaccagccatgggagcctgcgcatccaactgctgcataagctctccttcctggtgaacgccttagctaagcaggtcatgaacctcctagtgccatccctgcccaatctagtgaaaaaccagctgtgtcccgtgatcgaggcttccttcaatggcatgtatgcagacctcctgcagctggtgaaggtgcccatttccctcagcattgaccgtctggagtttgaccttctgtatcctgccatcaagggtgacaccattcagctctacctgggggccaagttgttggactcacagggaaaggtgaccaagtggttcaataactctgcagcttccctgacaatgcccaccctggacaacatcccgttcagcctcgtgagtcaggacgtggtgaaagctgcagtggctgctgtgctctctccagaagaattcatggtcctgttggactctgtgcttcctgagagtgcccatcggctgaagtcaagcatcgggctgatcaatgaaaaggctgcagataagctgggatctacccagatcgtgaagatcctaactcaggacactcccgagttttttatagaccaaggccatgccaaggtggcccaactgatcgtgctggaagtgtttccctccagtgaagccctccgccctttgttcaccctgggcatcgaagccagctcggaagctcagttttacaccaaaggtgaccaacttatactcaacttgaataacatcagctctgatcggatccagctgatgaactctgggattggctggttccaacctgatgttctgaaaaacatcatcactgagatcatccactccatcctgctgccgaaccagaatggcaaattaagatctggggtcccagtgtcattggtgaaggccttgggattcgaggcagctgagtcctcactgaccaaggatgcccttgtgcttactccagcctccttgtggaaacccagctctcctgtctcccagtgaagacttggatggcagccatcagggaag

SEQ ID NO: 388 - protein, 483 aa, Homo sapiens
MAGPWTFTLLCGLLAATLIQATLSPTAVLILGPKVIKEKLTQELKDHNATSILQQLPLLSAMREKPAGGIPVLGSLVNTVLKHIIWLKVITANILQLQVKPSANDQELLVKIPLDMVAGFNTPLVKTIVEFHMTTEAQATIRMDTSASGPTRLVLSDCATSHGSLRIQLLHKLSFLVNALAKQVMNLLVPSLPNLVKNQLCPVIEASFNGMYADLLQLVKVPISLSIDRLEFDLLYPAIKGDTIQLYLGAKLLDSQGKVTKWFNNSAASLTMPTLDNIPFSLVSQDVVKAAVAAVLSPEEFMVLLDSVLPESAHRLKSSIGLINEKAADKLGSTQIVKILTQDTPEFFIDQGHAKVAQLIVLEVFPSSEALRPLFTLGIEASSEAQFYTKGDQLILNLNNISSDRIQLMNSGIGWFQPDVLKNIITEIIHSILLPNQNGKLRSGVPVSLVKALGFEAAESSLTKDALVLTPASLWKPSSPVSQ

SEQ ID NO: 389 - DNA, 1392 bp, Homo sapiens
  CDS (7)..(1386)
aagcttcccactgcagttctcatcctcggcccaaaagtcatcaaagaaaagctgacacaggagctgaaggaccacaacgccaccagcatcctgcagcagctgccgctgctcagtgccatgcgggaaaagccagccggaggcatccctgtgctgggcagcctggtgaacaccgtcctgaaacacatcatctggctgaaggtcatcacagctaacatcctccagctgcaggtgaagccctcggccaatgaccaggagctgctagtcaagatccccctggacatggtggctggattcaacacgcccctggtcaagaccatcgtggagttccacatgacgactgaggcccaagccaccatccgcatggacaccagtgcaagtggccccacccgcctggtcctcagtgactgtgccaccagccatgggagcctgcgcatccaactgctgcataagctctccttcctggtgaacgccttagctaagcaggtcatgaacctcctagtgccgtccctgcccaatctagtgaaaaaccagctgtgtcccgtgatcgaggcttccttcaatggcatgtatgcagacctcctgcagctggtgaaggtgcccatttccctcagcattgaccgtctggagtttgaccttctgtatcctgccatcaagggtgacaccattcagctctacctgggggccaagttgttggactcacagggaaaggtgaccaagtggttcaataactctgcagcttccctgacaatgcccaccctggacaacatcccgttcagcctcatcgtgagtcaggacgtggtgaaagctgcagtggctgctgtgctctctccagaagaattcatggtcctgttggactctgtgcttcctgagagtgcccatcggctgaagtcaagcatcgggctgatcaatgaaaaggctgcagataagctgggacctacccagatcgtgaagatcctaactcaggacactcccgagttttttatagaccaaggccatgccaaggtggcccaactgatcgtgctggaagtgtttccctccagtgaagccctccgccctttgttcaccctgggcatcgaagccagctcggaagctcagttttacaccaaaggtgaccaacttatactcaacttgaataacatcagctctgatcggatccagctgatgaactctgggattggctggttccaacctgatgttctgaaaaacatcatcactgagatcatccactccatcctgctgccgaaccagaatggcaaattaagatctggggtcccagtgtcattggtgaaggccttgggattcgaggcagctgagtcctcactgaccaaggatgcccttgtgcttactccagcctccttgtggaaacccagctctcctgtctcccagctcgag

SEQ ID NO: 390 - protein, 460 aa, Homo sapiens
PTAVLILGPKVIKEKLTQELKDHNATSILQQLPLLSAMREKPAGGIPVLGSLVNTVLKHIIWLKVITANILQLQVKPSANDQELLVKIPLDMVAGFNTPLVKTIVEFHMTTEAQATIRMDTSASGPTRLVLSDCATSHGSLRIQLLHKLSFLVNALAKQVMNLLVPSLPNLVKNQLCPVIEASFNGMYADLLQLVKVPISLSIDRLEFDLLYPAIKGDTIQLYLGAKLLDSQGKVTKWFNNSAASLTMPTLDNIPFSLIVSQDVVKAAVAAVLSPEEFMVLLDSVLPESAHRLKSSIGLINEKAADKLGPTQIVKILTQDTPEFFIDQGHAKVAQLIVLEVFPSSEALRPLFTLGIEASSEAQFYTKGDQLILNLNNISSDRIQLMNSGIGWFQPDVLKNIITEIIHSILLPNQNGKLRSGVPVSLVKALGFEAAESSLTKDALVLTPASLWKPSSPVSQ

SEQ ID NO: 391 - DNA, 1684 bp, Homo sapiens
  CDS (77)..(1528)
agagaggagcgggccgaggactccagcgtgcccaggtctggcatcctgcacttgctgccctctgacacctgggaagatggccggcccgtggaccttcacccttctctgtggtttgctggcagccaccttgatccaagccaccctcagtcccactgcagttctcatcctcggcccaaaagtcatcaaagaaaagctgacacaggagctgaaggaccacaacgccaccagcatcctgcagcagctgccgctgctcagtgccatgcgggaaaagccagccggaggcatccctgtgctgggcagcctggtgaacaccgtcctgaagcacgtcatctggctgaaggtcatcacagctaacatcctccagctgcaggtgaagccctcggccaatgaccaggagctgctagtcaagatccccctggacatggtggctggattcaacacgcccctggtcaagaccatcgtggagttccacatgacgactgaggcccaagccaccatccgcatggacaccagtgcaagtggccccacccgcctggtcctcagtgactgtgccaccagccatgggagcctgcgcatccaactgctgcataagctctccttcctggtgaacgccttagctaagcaggtcatgaacctcctagtgccatccctgcccaatctagtgaaaaaccagctgtgtcccgtgatcgaggcttccttcaatggcatgtatgcagacctcctgcagctggtgaaggtgcccatttccctcagcattgaccgtctggagtttgaccttctgtatcctgccatcaagggtgacaccattcagctctacctgggggccaagttgttggactcacagggaaaggtgaccaagtggttcaataactctgcagcttccctgacaatgcccaccctggacaacatcccgttcagcctcatcgtgagtcaggacgtggtgaaagctgcagtggctgctgtgctctctccagaagaattcatggtcctgttggactctgtgcttcctgagagtgcccatcggctgaagtcaagcatcgggctgatcaatgaaaaggctgcagataagctgggatctacccagatcgtgaagatcctaactcaggacactcccgagttttttatagaccaaggccatgccaaggtggcccaactgatcgtgctggaagtgtttccctccagtgaagccctccgccctttgttcaccctgggcatcgaagccagctcggaagctcagttttacaccaaaggtgaccaacttatactcaacttgaataacatcagctctgatcggatccagctgatgaactctgggattggctggttccaacctgatgttctgaaaaacatcatcactgagatcatccactccatcctgctgccgaaccagaatggcaaattaagatctggggtcccagtgtcattggtgaaggccttgggattcgaggcagctgagtcctcactgagcaaggatgcccttgtgcttactccagcctccttgtggaaacccacctctcctgtctcccagtgaagacttggatggcagccatcagggaaggctgggtcccagctgggagtatgggtgtgagctctatagaccatccctctctgcaatcaataaacacttgcctgtgaaaaaaaaaaaaaaaaaagaaaaaaaaaaaaaaaaaaaaaaaaaaaaaaa

SEQ ID NO: 392 - protein, 484 aa, Homo sapiens
MAGPWTFTLLCGLLAATLIQATLSPTAVLILGPKVIKEKLTQELKDHNATSILQQLPLLSAMREKPAGGIPVLGSLVNTVLKHVIWLKVITANILQLQVKPSANDQELLVKIPLDMVAGFNTPLVKTIVEFHMTTEAQATIRMDTSASGPTRLVLSDCATSHGSLRIQLLHKLSFLVNALAKQVMNLLVPSLPNLVKNQLCPVIEASFNGMYADLLQLVKVPISLSIDRLEFDLLYPAIKGDTIQLYLGAKLLDSQGKVTKWFNNSAASLTMPTLDNIPFSLIVSQDVVKAAVAAVLSPEEFMVLLDSVLPESAHRLKSSIGLINEKAADKLGSTQIVKILTQDTPEFFIDQGHAKVAQLIVLEVFPSSEALRPLFTLGIEASSEAQFYTKGDQLILNLNNISSDRIQLMNSGIGWFQPDVLKNIITEIIHSILLPNQNGKLRSGVPVSLVKALGFEAAESSLSKDALVLTPASLWKPTSPVSQ

SEQ ID NO: 393 - DNA, 963 bp, Homo sapiens
  CDS (1)..(960)
atggccggcccgtggaccttcacccttctctgtggtttgctggcagccaccttgatccaagccaccctcagtcccactgcagttctcatcctcggcccaaaagtcatcaaagaaagtctgacacaggagctgaaggaccacaacgccaccagcatcctgcagcagctgccgctgctcagtgccatgcgggaaaagccagccggaggcatccctgtgctgggcagcctggtgaacaccgtcctgaagcgcatcaccccatccaggctgaaggtcatcacagctaacatcctccagctgcaggtgaagccctcggccaatgaccaggagctgctagtcaagatccccctggacatggtggctggattcaacacgcccctggtcaagaccatcgtggagttccacatgacgactgaggcccaagccaccatccgcatggacaccagtgcaagtggccccacccgcctggtcctcagtgactgtgccaccagccatgggagcctgcgcatccaactgctgcataagctctccttcctggtgaacgccttagctaagcaggtcatgaacctcctagtgccatccctgcccaatctagtgaaaaaccagctgtgtcccgtgatcgaggcttccttcaatggcatgtatgcagacctcctgcagctggtgaagggtaggtgctctgctctctctcccactttttcctttactacggagctggcctccagacccggaaaggtgaccaagtggttcaataactctgcagcttccctgacaatgcccaccctggacaacatcccgttcagcctcatcgtgagtcaggacgtggtgaaagctgcagtggctgctgtgctctctccagaagaattcatggtcctgttggactctgtggtaaacctcagcacaaggcagagaatagggccgcccaggccacatcataggaatttcctgaacacagggtgcccctaa

SEQ ID NO: 394 - protein, 320 aa, Homo sapiens
MAGPWTFTLLCGLLAATLIQATLSPTAVLILGPKVIKESLTQELKDHNATSILQQLPLLSAMREKPAGGIPVLGSLVNTVLKRITPSRLKVITANILQLQVKPSANDQELLVKIPLDMVAGFNTPLVKTIVEFHMTTEAQATIRMDTSASGPTRLVLSDCATSHGSLRIQLLHKLSFLVNALAKQVMNLLVPSLPNLVKNQLCPVIEASFNGMYADLLQLVKGRCSALSPTFSFTTELASRPGKVTKWFNNSAASLTMPTLDNIPFSLIVSQDVVKAAVAAVLSPEEFMVLLDSVVNLSTRQRIGPPRPHHRNFLNTGCP

SEQ ID NO: 395 - DNA, 963 bp, Homo sapiens
  CDS (1)..(960)
atggccggcccgtggaccttcacccttctctgtggtttgctggcagccaccttgatccaagccaccctcagtcccactgcagttctcatcctcggcccaaaagtcatcaaagaaagtctgacacaggagctgaaggaccacaacgccaccagcatcctgcagcagctgccgctgctcagtgccatgcgggaaaagccagccggaggcatccctgtgctgggcagcctggtgaacaccgtcctgaagcacgtcaccccatccaggctgaaggtcatcacagctaacatcctccagctgcaggtgaagccctcggccaatgaccaggagctgctagtcaagatccccctggacatggtggctggattcaacacgcccctggtcaagaccatcgtggagttccacatgacgactgaggcccaagccaccatccgcatggacaccagtgcaagtggccccacccgcctggtcctcagtgactgtgccaccagccatgggagcctgcgcatccaactgctgcataagctctccttcctggtgaacgccttagctaagcaggtcatgaacctcctagtgccatccctgcccaatctagtgaaaaaccagctgtgtcccgtgatcgaggcttccttcaatggcatgtatgcagacctcctgcagctggtgaagggtaggtgctctgctctctctcccactttttcctttactacggagctggcctccagacccggaaaggtgaccaagtggttcaataactctgcagcttccctgacaatgcccaccctggacaacatcccgttcagcctcatcgtgagtcaggacgtggtgaaagctgcagtggctgctgtgctctctccagaagaattcatggtcctgttggactctgtggtaaacctcagcacaaggcagagaatagggccgcccaggccacatcataggaatttcctgaacacagggtgcccctaa

SEQ ID NO: 396 - protein, 320 aa, Homo sapiens
MAGPWTFTLLCGLLAATLIQATLSPTAVLILGPKVIKESLTQELKDHNATSILQQLPLLSAMREKPAGGIPVLGSLVNTVLKHVTPSRLKVITANILQLQVKPSANDQELLVKIPLDMVAGFNTPLVKTIVEFHMTTEAQATIRMDTSASGPTRLVLSDCATSHGSLRIQLLHKLSFLVNALAKQVMNLLVPSLPNLVKNQLCPVIEASFNGMYADLLQLVKGRCSALSPTFSFTTELASRPGKVTKWFNNSAASLTMPTLDNIPFSLIVSQDVVKAAVAAVLSPEEFMVLLDSVVNLSTRQRIGPPRPHHRNFLNTGCP

SEQ ID NO: 397 - DNA, 5103 bp, Homo sapiens
  CDS (1)..(5100)
atgggcttcttgcccaagcttctcctcctggcctcagccgttcttcccccaggccaggcctcatggggcgtctccagtccccaggacgtgcagggtgtgaaggggtcttgcctgcttatcccctgcatcttcagcttccctgccgacgtggaggtgcccgacggcatcacggccatctggtactacgactactcgggccagcggcaggtggtgagccactcggcggaccccaagctggtggaggcccgcttccgcggccgcaccgagttcatggggaaccccgagcacagggtgtgcaacctgctgctgaaggacctgcagcccgaggactctggttcctacaacttccgcttcgagatcagtgaggtcaaccgctggtcagatgtgaaaggcaccttggtcacagtaacaggtgatcccagggtgcccaccattgcctccccggtggagcttctcgagggcacagaggtggacttcaactgctccactccctacgtatgcctgcaggagcaggtcagactgcagtggcaaggccaggaccctgctcgctctgtcaccttcaacagccagaagtttgagcccaccggcgtcggccacctggagaccctccacatggccatgtcctggcaggaccacggccggatcctgcgctgccagctctccgtggccaatcacagggctcagagcgagattcacctccaagtgaagtgtgcccccaagggtgtgaagatcctcctcagcccctcggggaggaacatccttccaggtgagctggtcacactcacctgccaggtgaacagcagctaccctgcagtcagttccattaagtggctcaaggatggggtacgcctccaaaccaagactggtgtgctgcacctgccccaggcagcctggagcgatgctggcgtctacacctgccaagctgagaacggcgtgggctctttggtctcaccccccatcagcctccacatcttcgtggctgaggtccaggtgagcccagcaggtcccatcctggagaaccagacagtgacactagtctgcaacacacccaatgaggcacccagtgatctccgctacagctggtacaagaaccatgtcctgctggaggatgcccactcccataccctccggctgcacttggccactagggctgatactggcttctacttctgtgaggtgcagaacgtccatggcagcgagcgctcgggccctgtcagcgtggtagtcacagacccgcctctcactccagtcctgacagccttcctggagacccaggcgggacttgtgggcatccttcactgctctgtggtcagtgagcccctggccacactggtgctgtcacatgggggtcatatcctggcctccacctccggggacagtgatcacagcccacgcttcagtggtacctctggtcccaactccctgcgcctggagatccgagacctggaggaaactgacagtggggagtacaagtgctcagccaccaactcccttggaaatgcaacctccaccctggacttccatgccaatgtcgcccgtctcctcatcagcccggcagccgaggtggtggaaggacaggcagtgacactgagctgcagaagcggcctaagccccacacctgatgcccgcttctcctggtacctgaatggagccctgcttcacgagggtcccggcagcagcctcctgctccccgcggcctccagcactgacgccggctcataccactgccgggcccgggacggccacagtgccagtggcccctcttcgccagctgttctcactgtgctctgtgagcagccaccacgacaaccaacattcaccaccaggctggaccttgatgccgctggggccggggctggacggcgaggcctccttttgtgccgtgtggacagcgacccccccgccaggctgcagctgctccacaaggaccgtgttgtggccacttccctgccatcagggggtggctgcagcacctgtgggggctgttccccacgcatgaaggtcaccaaagcccccaacttgctgcgtgtggagattcacaaccctttgctggaagaggagggcttgtacctctgtgaggccagcaatgccctgggcaacgcctccacctcagccaccttcaatggccaggccactgtcctggccattgcaccatcacacacacttcaggagggcacagaagccaacttgacttgcaacgtgagccgggaagctgctggcagccctgctaacttctcctggttccgaaatggggtgctgtgggcccagggtcccctggagaccgtgacactgctgcccgtggccagaactgatgctgccctttacgcctgccgcatcctgactgaggctggtgcccagctctccactcccgtgctcctgagtgtactctatcccccggaccgtccaaagctgtcagccctcctagacatgggccagggccacatggctctgttcatctgcactgtggacagccgccccctggccttgctggccttgttccatggggagcacctcctggccaccagcctgggtccccaggtcccatcccatggtcggttccaggctaaagctgaggccaactccctgaagttagaggtccgagaactgggccttggggactctggcagctaccgctgtgaggccacaaatgttcttggatcatccaacacctcactcttcttccaggtccgaggtgcctgggtccaggtgtcaccatcacctgagctccaagagggccaggctgtggtcctgagctgccaggtacacacaggagtcccagaggggacctcatatcgttggtatcgggatggccagcccctccaggagtcgacctcggccacgctccgctttgcagccataactttgacacaagctggggcctatcattgccaagcccaggccccaggctcagccaccacgagcctagctgcacccatcagcctccacgtgtcctgtaaggatgccccacgccacgtcacactcactaccctgatggacacaggccctggacgactgggcctcctcctgtgccgtgtggacagtgaccctccggcccagctgcggctgctccacggggatcgccttgtggcctccaccctacaaggtgtggggggacccgaaggcagctctcccaggctgcatgtggctgtggcccccaacacactgcgtctggagatccacggggctatgctggaggatgagggtgtctatatctgtgaggcctccaacaccctgggccaggcctcggcctcagctgacttcgacgctcaaagctgtgaatgtgcaggtgtggcccggggctaccgtgcgggaggggcagctggtgaacctgacctgccttgtgtggaccactcacccggcccagctcacctacacatggtaccaggatgggcagcagcgcctggatgcccactccatccccctgcccaacgtcacagtcagggatgccacctcctaccgctgcggtgtgggcccccctggtcgggcaccccgcctctccagacctatcaccttggacgtcctcacgcgccccgcaacctgcgcctgacctacctcctggagagccatggcgggcagctggccctggtactgtgcactgtggacagccgcccgcccgcccagctggccctcagccacgccggtcgcctcttggcctcctcgacagcagcctctgtccccaacaccctgcgcctggagctgcgagggccacagcccagggatgagggtttctacagctgctctgcccgcagccctctgggccaggccaacacgtccctggagctgcggctggaggtgcgggtgatcctggctccggaggctgccgtgcctgaaggtgcccccatcacagtgacctgtgcggaccctgctgcccacgcacccacactctatacttggtaccacaacggtcgttggctgcaggagggtccagctgcctcactctcattcctggtggccacgcgggctcatgcaggcgcctactcttgccaggcccaggatgcccagggcacccgcagctcccgtcctgctgccctgcaagtcctctgtgcccctcaggacgctgtcctgtcctccttccgggactccagggccagatccatggctgtgatacagtgcactgtggacagtgagccacctgctgagctggccctatctcatgatggcaaggtgctggccacgagcagcggggtccacagcttggcatcagggacaggccatgtccaggtggcccgaaacgccctacggctgcaggtgcaagatgtgcctgcaggtgatgacacctatgtttgcacagcccaaaacttgctgggctcaatcagcaccatcgggcggttgcaggtagaaggtgagtggcgcgtggtggcagagcctggcctggacgtgcctgagggcgctgccctgaacctcagctgccgcctcctgggtggccctgggcctgtgggcaactccacctttgcatggttctggaatgaccggcggctgcacgcggagcctgtgcccactctcgccttcacccacgtggctcgtgctcaagctgggatgtaccactgcctggctgagctccccactggggctgctgcctctgctccagtcatgctccgtgtgctctaccctcccaagacgcccaccatgatggtcttcgtggagcctgagggtggcctccggggcatcctggattgccgagtggacagcgagccgctcgccagcctgactctccaccttggcagtcgactggtggcctccagtcagccccagggtgctcctgcagagccacacatccatgtcctggcttcccccaatgccctgagggtggacatcgaggcgctgaggcccagcgaccaaggggaatacatctgttctgcctcaaatgtcctgggccctgcctctacctccacctactttggggtcagagccctgcaccgcctgcatcagttccagcagctgctctgggtcctgggactgctggtgggcctcctgctcctgctgttgggcctgggggcctgctacacctggagaaggaggcgtgtttgtaagcagagcatgggcgagaatccagggcgggcatcgtctttccatttactgcctctagctgggtcttcaaggtga

SEQ ID NO: 398 - protein, 1700 aa, Homo sapiens
MGFLPKLLLLASAVLPPGQASWGVSSPQDVQGVKGSCLLIPCIFSFPADVEVPDGITAIWYYDYSGQRQVVSHSADPKLVEARFRGRTEFMGNPEHRVCNLLLKDLQPEDSGSYNFRFEISEVNRWSDVKGTLVTVTGDPRVPTIASPVELLEGTEVDFNCSTPYVCLQEQVRLQWQGQDPARSVTFNSQKFEPTGVGHLETLHMAMSWQDHGRILRCQLSVANHRAQSEIHLQVKCAPKGVKILLSPSGRNILPGELVTLTCQVNSSYPAVSSIKWLKDGVRLQTKTGVLHLPQAAWSDAGVYTCQAENGVGSLVSPPISLHIFVAEVQVSPAGPILENQTVTLVCNTPNEAPSDLRYSWYKNHVLLEDAHSHTLRLHLATRADTGFYFCEVQNVHGSERSGPVSVVVTDPPLTPVLTAFLETQAGLVGILHCSVVSEPLATLVLSHGGHILASTSGDSDHSPRFSGTSGPNSLRLEIRDLEETDSGEYKCSATNSLGNATSTLDFHANVARLLISPAAEVVEGQAVTLSCRSGLSPTPDARFSWYLNGALLHEGPGSSLLLPAASSTDAGSYHCRARDGHSASGPSSPAVLTVLCEQPPRQPTFTTRLDLDAAGAGAGRRGLLLCRVDSDPPARLQLLHKDRVVATSLPSGGGCSTCGGCSPRMKVTKAPNLLRVEIHNPLLEEEGLYLCEASNALGNASTSATFNGQATVLAIAPSHTLQEGTEANLTCNVSREAAGSPANFSWFRNGVLWAQGPLETVTLLPVARTDAALYACRILTEAGAQLSTPVLLSVLYPPDRPKLSALLDMGQGHMALFICTVDSRPLALLALFHGEHLLATSLGPQVPSHGRFQAKAEANSLKLEVRELGLGDSGSYRCEATNVLGSSNTSLFFQVRGAWVQVSPSPELQEGQAVVLSCQVHTGVPEGTSYRWYRDGQPLQESTSATLRFAAITLTQAGAYHCQAQAPGSATTSLAAPISLHVSCKDAPRHVTLTTLMDTGPGRLGLLLCRVDSDPPAQLRLLHGDRLVASTLQGVGGPEGSSPRLHVAVAPNTLRLEIHGAMLEDEGVYICEASNTLGQASASADFDAQSCECAGVARGYRAGGAAGEPDLPCVDHSPGPAHLHMVPGWAAAPGCPLHPPAQRHSQGCHLLPLRCGPPWSGTPPLQTYHLGRPHAPRNLRLTYLLESHGGQLALVLCTVDSRPPAQLALSHAGRLLASSTAASVPNTLRLELRGPQPRDEGFYSCSARSPLGQANTSLELRLEVRVILAPEAAVPEGAPITVTCADPAAHAPTLYTWYHNGRWLQEGPAASLSFLVATRAHAGAYSCQAQDAQGTRSSRPAALQVLCAPQDAVLSSFRDSRARSMAVIQCTVDSEPPAELALSHDGKVLATSSGVHSLASGTGHVQVARNALRLQVQDVPAGDDTYVCTAQNLLGSISTIGRLQVEGEWRVVAEPGLDVPEGAALNLSCRLLGGPGPVGNSTFAWFWNDRRLHAEPVPTLAFTHVARAQAGMYHCLAELPTGAAASAPVMLRVLYPPKTPTMMVFVEPEGGLRGILDCRVDSEPLASLTLHLGSRLVASSQPQGAPAEPHIHVLASPNALRVDIEALRPSDQGEYICSASNVLGPASTSTYFGVRALHRLHQFQQLLWVLGLLVGLLLLLLGLGACYTWRRRRVCKQSMGENPGRASSFHLLPLAGSSR

SEQ ID NO: 399 - DNA, 717 bp, Homo sapiens
  CDS (1)..(717)
agatcttcatggggcgtctccagtccccaggacgtgcagggtgtgaaggggtcttgcctgcttatcccctgcatcttcagcttccctgccgacgtggaggtgcccgacggcatcacggccatctggtactacgactactcgggccagcggcaggtggtgagccactcggcggaccccaagctggtggaggcccgcttccgcggccgcaccgagttcatggggaaccccgagcacagggtgtgcaacctgctgctgaaggacctgcagcccgaggactctggttcctacaacttccgcttcgagatcagtgaggtcaaccgctggtcagatgtgaaaggcaccttggtcacagtaacagaggagcccagggtgcccaccattgcctccccggtggagcttctcgagggcacagaggtggacttcaactgctccactccctacgtatgcctgcaggagcaggtcagactgcagtggcaaggccaggaccctgctcgctctgtcaccttcaacagccagaagtttgagcccaccggcgtcggccacctggagaccctccacatggccatgtcctggcaggaccacggccggatcctgcgctgccagctctccgtggccaatcacagggctcagagcgagattcacctccaagtgaagtatgcccccaggggtgtgaagatcctcctcagcccctcggggaggaacatccttccagtcgac

SEQ ID NO: 400 - protein, 239 aa, Homo sapiens
RSSWGVSSPQDVQGVKGSCLLIPCIFSFPADVEVPDGITAIWYYDYSGQRQVVSHSADPKLVEARFRGRTEFMGNPEHRVCNLLLKDLQPEDSGSYNFRFEISEVNRWSDVKGTLVTVTEEPRVPTIASPVELLEGTEVDFNCSTPYVCLQEQVRLQWQGQDPARSVTFNSQKFEPTGVGHLETLHMAMSWQDHGRILRCQLSVANHRAQSEIHLQVKYAPRGVKILLSPSGRNILPVD

SEQ ID NO: 401 - DNA, 717 bp, Homo sapiens
  CDS (1)..(717)
agatcttcatggggcgtctccagtccccaggacgtgcagggtgtgaaggggtcttgcctgcttatcccctgcatcttcagcttccctgccgacgtggaggtgcccgacggcatcacggccatctggtactacgactactcgggccagcggcaggtggtgagccactcggcggaccccaagctggtggaggcccgcttccgcggccgcaccgagttcatggggaaccccgagcacagggtgtgcaacctgctgctgaaggacctgcagcccgaggactctggttcctacaacttccgcttcgagatcagtgaggtcaaccgctggtcagatgtgaaaggcaccttggtcacagtaacagaggagcccagggtgcccaccattgcctccccggtggagcttctcgagggcacagaggtggacttcaactgctccactccctacgtatgcctgcaggagcaggtcagactgcagtggcaaggccaggaccctgctcgctctgtcaccttcaacagccagaagtttgagcccaccggcgtcggccacctggagaccctccacatggccatgtcctggcaggaccacggccggatcctgcgctgccagctctccatggccaatcacagggctcagagcgagattcacctccaagtgaagtatgcccccaggggtgtgaagatcctcctcagcccctcggggaggaacatccttccagtcgac

SEQ ID NO: 402 - protein, 239 aa, Homo sapiens
RSSWGVSSPQDVQGVKGSCLLIPCIFSFPADVEVPDGITAIWYYDYSGQRQVVSHSADPKLVEARFRGRTEFMGNPEHRVCNLLLKDLQPEDSGSYNFRFEISEVNRWSDVKGTLVTVTEEPRVPTIASPVELLEGTEVDFNCSTPYVCLQEQVRLQWQGQDPARSVTFNSQKFEPTGVGHLETLHMAMSWQDHGRILRCQLSMANHRAQSEIHLQVKYAPRGVKILLSPSGRNILPVD

SEQ ID NO: 403 - DNA, 717 bp, Homo sapiens
  CDS (1)..(717)
agatcttcatggggcgtctccagtccccaggacgtgcagggtgtgaaggggtcttgcctgcttatcccctgcatcttcagcttccctgccgacgtggaggtgcccgacggcatcacggccatctggtactacgactactcgggccagcggcaggtggtgagccactcggtggaccccaagctggtggaggcccgcttccgcggccgcaccgagttcatggggaaccccgagcacagggtgtgcaacctgctgctgaaggacctgcagcccgaggactctggttcctacaacttccgcttcgagatcagtgaggtcaaccgctggtcagatgtgaaaggcaccttggtcacagtaacagaggagcccagggtgcccaccattgcctccccggtggagcttctcgagggcacagaggtggacttcaactgctccactccctacgtatgcctgcaggagcaggtcagactgcagtggcaaggccaggaccctgctcgctctgtcaccttcaacagccagaagtttgagcccaccggcgtcggccacctggagaccctccacatggccatgtcctggcaggaccacggccggatcctgcgctgccagctctccatggccaatcacagggctcagagcgagattcacctccaagtgaagtatgcccccaagggtgtgaagatcctcctcagcccctcggggaggaacatccttccagtcgac

SEQ ID NO: 404 - protein, 239 aa, Homo sapiens
RSSWGVSSPQDVQGVKGSCLLIPCIFSFPADVEVPDGITAIWYYDYSGQRQVVSHSVDPKLVEARFRGRTEFMGNPEHRVCNLLLKDLQPEDSGSYNFRFEISEVNRWSDVKGTLVTVTEEPRVPTIASPVELLEGTEVDFNCSTPYVCLQEQVRLQWQGQDPARSVTFNSQKFEPTGVGHLETLHMAMSWQDHGRILRCQLSMANHRAQSEIHLQVKYAPKGVKILLSPSGRNILPVD

SEQ ID NO: 405 - DNA, 717 bp, Homo sapiens; identical to SEQ ID NO: 399
  CDS (7)..(711)

SEQ ID NO: 406 - protein, 235 aa, Homo sapiens
SWGVSSPQDVQGVKGSCLLIPCIFSFPADVEVPDGITAIWYYDYSGQRQVVSHSADPKLVEARFRGRTEFMGNPEHRVCNLLLKDLQPEDSGSYNFRFEISEVNRWSDVKGTLVTVTEEPRVPTIASPVELLEGTEVDFNCSTPYVCLQEQVRLQWQGQDPARSVTFNSQKFEPTGVGHLETLHMAMSWQDHGRILRCQLSVANHRAQSEIHLQVKYAPRGVKILLSPSGRNILP

SEQ ID NO: 407 - DNA, 717 bp, Homo sapiens; identical to SEQ ID NO: 403
  CDS (7)..(711)

SEQ ID NO: 408 - protein, 235 aa, Homo sapiens
SWGVSSPQDVQGVKGSCLLIPCIFSFPADVEVPDGITAIWYYDYSGQRQVVSHSVDPKLVEARFRGRTEFMGNPEHRVCNLLLKDLQPEDSGSYNFRFEISEVNRWSDVKGTLVTVTEEPRVPTIASPVELLEGTEVDFNCSTPYVCLQEQVRLQWQGQDPARSVTFNSQKFEPTGVGHLETLHMAMSWQDHGRILRCQLSMANHRAQSEIHLQVKYAPKGVKILLSPSGRNILP

SEQ ID NO: 409 - DNA, 5130 bp, Homo sapiens
  CDS (1)..(5127)
atgggcttcttgcccaagcttctcctcctggcctcattcttcccagcaggccaggcctcatggggcgtctccagtccccaggacgtgcagggtgtgaaggggtcttgcctgcttatcccctgcatcttcagcttccctgccgacgtggaggtgcccgacggcatcacggccatctggtactacgactactcgggccagcggcaggtggtgagccactcggcggaccccaagctggtggaggcccgcttccgcggccgcaccgagttcatggggaaccccgagcacagggtgtgcaacctgctgctgaaggacctgcagcccgaggactctggttcctacaacttccgcttcgaaatcagtgaggtcaaccgctggtcagatgtgaaaggcaccttggtcacagtaacagaggagcccagggtgcccaccattgcctccccggtggagcttctcgagggcacagaggtggacttcaactgctccactccctacgtatgcctgcaggagcaggtcagactgcagtggcaaggccaggaccctgctcgctctgtcaccttcaacagccagaagtttgagcccaccggcgtcggccacctggagaccctccacatggccatgtcctggcaggaccacggccggatcctgcgctgccagctctccgtggccaatcacagggctcagagcgagattcacctccaagtgaagtatgcccccaagggtgtgaagatcctcctcagcccctcggggaggaacatccttccaggtgagctggtcacactcacctgccaggtgaacagcagctaccctgcagtcagttccattaagtggctcaaggatggggtacgcctccaaaccaagactggtgtgctgcacctgccccaggcagcctggagcgatgctggcgtctacacctgccaagctgagaacggcgtgggctctttggtctcaccccccatcagcctccacatcttcatggctgaggtccaggtgagcccagcaggtcccatcctggagaaccagacagtgacactagtctgcaacacacccaatgaggcacccagtgatctccgctacagctggtacaagaaccatgtcctgctggaggatgcccactcccataccctccggctgcacttggccactagggctgatactggcttctacttctgtgaggtgcagaacgtccatggcagcgagcgctcgggccctgtcagcgtggtagtcaaccacccgcctctcactccagtcctgacagccttcctggagacccaggcgggacttgtgggcatccttcactgctctgtggtcagtgagcccctggccacactggtgctgtcacatgggggtcatatcctggcctccacctccggggacagtgatcacagcccacgcttcagtggtacctctggtcccaactccctgcgcctggagatccgagacctggaggaaactgacagtggggagtacaagtgctcagccaccaactcccttggaaatgcaacctccaccctggacttccatgccaatgccgcccgtctcctcatcagcccggcagccgaggtggtggaaggacaggcagtgacactgagctgcagaagcggcctaagccccacacctgatgcccgcttctcctggtacctgaatggagccctgcttcacgagggtcccggcagcagcctcctgctccccgcggcctccagcactgacgccggctcataccactgccgggcccgggacggccacagtgccagtggcccctcttcgccagctgttctcactgtgctctacccccctcgacaaccaacattcaccaccaggctggaccttgatgccgctggggccggggctggacggcgaggcctccttttgtgccgtgtggacagcgacccccccgccaggctgcagctgctccacaaggaccgtgttgtggccacttccctgccatcagggggtggctgcagcacctgtgggggctgttccccacgcatgaaggtcaccaaagcccccaacttgctgcgtgtggagattcacaaccctttgctggaagaggagggcttgtacctctgtgaggccagcaatgccctgggcaacgcctccacctcagccaccttcaatggccaggccactgtcctggccattgcaccatcacacacacttcaggagggcacagaagccaacttgacttgcaacgtgagccgggaagctgctggcagccctgctaacttctcctggttccgaaatggggtgctgtgggcccagggtcccctggagaccgtgacactgctgcccgtggccagaactgatgctgccctttacgcctgccgcatcctgactgaggctggtgcccagctctccactcccgtgctcctgagtgtactctatcccccggaccgtccaaagctgtcagccctcctagacatgggccagggccacatggctctgttcatctgcactgtggacagccgccccctggccttgctggccttgttccatggggagcacctcctggccaccagcctgggtccccaggtcccatcccatggtcggttccaggctaaagctgaggccaactccctgaagttagaggtccgagaactgggccttggggactctggcagctaccgctgtgaggccacaaatgttcttggatcatccaacacctcactcttcttccaggtccgaggagcctgggtccaggtgtcaccatcacctgagctccaagagggccaggctgtggtcctgagctgccaggtacacacaggagtcccagaggggacctcatatcgttggtatcgggatggccagcccctccaggagtcgacctcggccacgctccgctttgcagccataactttgacacaagctggggcctatcattgccaagcccaggccccaggctcagccaccacgagcctagctgcacccatcagcctccacgtgtcctatgccccacgccacgtcacactcactaccctgatggacacaggccctggacgactgggcctcctcctgtgccgtgtggacagtgaccctccggcccagctgcggctgctccacggggatcgccttgtggcctccaccctacaaggtgtggggggacccgaaggcagctctcccaggctgcatgtggctgtggcccccaacacactgcgtctggagatccacggggctatgctggaggatgagggtgtctatatctgtgaggcctccaacaccctgggccaggcctcggcctcagctgacttcgacgctcaagctgtgaatgtgcaggtgtggcccggggctaccgtgcgggaggggcagctggtgaacctgacctgccttgtgtggaccactcacccggcccagctcacctacacatggtaccaggatgggcagcagcgcctggatgcccactccatccccctgcccaacgtcacagtcagggatgccacctcctaccgctgcggtgtgggcccccctggtcgggcaccccgcctctccagacctatcaccttggacgtcctctacgcgccccgcaacctgcgcctgacctacctcctggagagccatggcgggcagctggccctggtactgtgcactgtggacagccgcccgcccgcccagctggccctcagccacgccggtcgcctcttggcctcctcgacagcagcctctgtccccaacaccctgcgcctggagctgcgagggccacagcccagggatgagggtttctacagctgctctgcccgcagccctctgggccaggccaacacgtccctggagctgcggctggagggtgtgcgggtgatcctggctccggaggctgccgtgcctgaaggtgcccccatcacagtgacctgtgcggaccctgctgcccacgcacccacactctatacttggtaccacaacggtcgttggctgcaggagggtccagctgcctcactctcattcctggtggccacgcgggctcatgcaggcgcctactcttgccaggcccaggatgcccagggcacccgcagctcccgtcctgctgccctgcaagtcctctatgcccctcaggacactgtcctgtcctccttccgggactccagggccagatccatggctgtgatacagtgcactgtggacagtgagccacctgctgagctggccctatctcatgatggcaaggtgctggccacgagcagcggggtccacagcttggcatcagggacaggccatgtccaggtggcccgaaacgccctacggctgcaggtgcaagatgtgcctgcaggtgatgacacctatgtttgcacagcccaaaacttgctgggctcaatcagcaccatcgggcggttgcaggtagaaggtgcacgcgtggtggcagagcctggcctggacgtgcctgagggcgctgccctgaacctcagctgccgcctcctgggtggccctgggcctgtgggcaactccacctttgcatggttctggaatgaccggcggctgcacgcggagcctgtgcccactctcgccttcacccacgtggctcgtgctcaagctgggatgtaccactgcctggctgagctccccactggggctgctgcctctgctccagtcatgctccgtgtgctctaccctcccaagacgcccaccatgatggtcttcgtggagcctgagggtggcctccggggcatcctggattgccgagtggacagcgagccgctcgccagcctgactctccaccttggcagtcgactggtggcctccagtcagccccagggtgctcctgcagagccacacatccatgtcctggcttcccccaatgccctgagggtggacatcgaggcgctgaggcccagcgaccaaggggaatacatctgttctgcctcaaatgtcctgggctctgcctctacctccacctactttggggtcagagccctgcaccgcctgcatcagttccagcagctgctctgggtcctgggactgctggtgggcctcctgctcctgctgttgggcctgggggcctgctacacctggagaaggaggcgtgtttgtaagcagagcatgggcgagaattcggtggagatggcttttcagaaagagaccacgcagctcattgatcctgatgcagccacatgtgagacctcaacctgtgccccacccctgggctga

SEQ ID NO: 410 - protein, 1709 aa, Homo sapiens [sequence omitted]

SEQ ID NO: 411 - DNA, 5103 bp, Homo sapiens
  CDS (1)..(5100)
atgggcttcttgcccaagcttctcctcctggcctcagccgttcttcccccaggccaggcctcatggggcgtctccagtccccaggacgtgcagggtgtgaaggggtcttgcctgcttatcccctgcatcttcagcttccctgccgacgtggaggtgcccgacggcatcacggccatctggtactacgactactcgggccagcggcaggtggtgagccactcggcggaccccaagctggtggaggcccgcttccgcggccgcaccgagttcatggggaaccccgagcacagggtgtgcaacctgctgctgaaggacctgcagcccgaggactctggttcctacaacttccgcttcgagatcagtgaggtcaaccgctggtcagatgtgaaaggcaccttggtcacagtaacaggtgatcccagggtgcccaccattgcctccccggtggagcttctcgagggcacagaggtggacttcaactgctccactccctacgtatgcctgcaggagcaggtcagactgcagtggcaaggccaggaccctgctcgctctgtcaccttcaacagccagaagtttgagcccaccggcgtcggccacctggagaccctccacatggccatgtcctggcaggaccacggccggatcctgcgctgccagctctccgtggccaatcacagggctcagagcgagattcacctccaagtgaagtgtgcccccaagggtgtgaagatcctcctcagcccctcggggaggaacatccttccaggtgagctggtcacactcacctgccaggtgaacagcagctaccctgcagtcagttccattaagtggctcaaggatggggtacgcctccaaaccaagactggtgtgctgcacctgccccaggcagcctggagcgatgctggcgtctacacctgccaagctgagaacggcgtgggctctttggtctcaccccccatcagcctccacatcttcgtggctgaggtccaggtgagcccagcaggtcccatcctggagaaccagacagtgacactagtctgcaacacacccaatgaggcacccagtgatctccgctacagctggtacaagaaccatgtcctgctggaggatgcccactcccataccctccggctgcacttggccactagggctgatactggcttctacttctgtgaggtgcagaacgtccatggcagcgagcgctcgggccctgtcagcgtggtagtcacagacccgcctctcactccagtcctgacagccttcctggagacccaggcgggacttgtgggcatccttcactgctctgtggtcagtgagcccctggccacactggtgctgtcacatgggggtcatatcctggcctccacctccggggacagtgatcacagcccacgcttcagtggtacctctggtcccaactccctgcgcctggagatccgagacctggaggaaactgacagtggggagtacaagtgctcagccaccaactcccttggaaatgcaacctccaccctggacttccatgccaatgtcgcccgtctcctcatcagcccggcagccgaggtggtggaaggacaggcagtgacactgagctgcagaagcggcctaagccccacacctgatgcccgcttctcctggtacctgaatggagccctgcttcacgagggtcccggcagcagcctcctgctccccgcggcctccagcactgacgccggctcataccactgccgggcccgggacggccacagtgccagtggcccctcttcgccagctgttctcactgtgctctgtgagcagccaccacgacaaccaacattcaccaccaggctggaccttgatgccgctggggccggggctggacggcgaggcctccttttgtgccgtgtggacagcgacccccccgccaggctgcagctgctccacaaggaccgtgttgtggccacttccctgccatcagggggtggctgcagcacctgtgggggctgttccccacgcatgaaggtcaccaaagcccccaacttgctgcgtgtggagattcacaaccctttgctggaagaggagggcttgtacctctgtgaggccagcaatgccctgggcaacgcctccacctcagccaccttcaatggccaggccactgtcctggccattgcaccatcacacacacttcaggagggcacagaagccaacttgacttgcaacgtgagccgggaagctgctggcagccctgctaacttctcctggttccgaaatggggtgctgtgggcccagggtcccctggagaccgtgacactgctgcccgtggccagaactgatgctgccctttacgcctgccgcatcctgactgaggctggtgcccagctctccactcccgtgctcctgagtgtactctatcccccggaccgtccaaagctgtcagccctcctagacatgggccagggccacatggctctgttcatctgcactgtggacagccgccccctggccttgctggccttgttccatggggagcacctcctggccaccagcctgggtccccaggtcccatcccatggtcggttccaggctaaagctgaggccaactccctgaagttagaggtccgagaactgggccttggggactctggcagctaccgctgtgaggccacaaatgttcttggatcatccaacacctcactcttcttccaggtccgaggtgcctgggtccaggtgtcaccatcacctgagctccaagagggccaggctgtggtcctgagctgccaggtacacacaggagtcccagaggggacctcatatcgttggtatcgggatggccagcccctccaggagtcgacctcggccacgctccgctttgcagccataactttgacacaagctggggcctatcattgccaagcccaggccccaggctcagccaccacgagcctagctgcacccatcagcctccacgtgtcctgtaaggatgccccacgccacgtcacactcactaccctgatggacacaggccctggacgactgggcctcctcctgtgccgtgtggacagtgaccctccggcccagctgcggctgctccacggggatcgccttgtggcctccaccctacaaggtgtggggggacccgaaggcagctctcccaggctgcatgtggctgtggcccccaacacactgcgtctggagatccacggggctatgctggaggatgagggtgtctatatctgtgaggcctccaacaccctgggccaggcctcggcctcagctgacttcgacgctcaaagctgtgaatgtgcaggtgtggcccggggctaccgtgcgggaggggcagctggtgaacctgacctgccttgtgtggaccactcacccggcccagctcacctacacatggtaccaggatgggcagcagcgcctggatgcccactccatccccctgcccaacgtcacagtcagggatgccacctcctaccgctgcggtgtgggcccccctggtcgggcaccccgcctctccagacctatcaccttggacgtcctcacgcgccccgcaacctgcgcctgacctacctcctggagagccatggcgggcagctggccctggtactgtgcactgtggacagccgcccgcccgcccagctggccctcagccacgccggtcgcctcttggcctcctcgacagcagcctctgtccccaacaccctgcgcctggagctgcgagggccacagcccagggatgagggtttctacagctgctctgcccgcagccctctgggccaggccaacacgtccctggagctgcggctggaggtgcgggtgatcctggctccggaggctgccgtgcctgaaggtgcccccatcacagtgacctgtgcggaccctgctgcccacgcacccacactctatacttggtaccacaacggtcgttggctgcaggagggtccagctgcctcactctcattcctggtggccacgcgggctcatgcaggcgcctactcttgccaggcccaggatgcccagggcacccgcagctcccgtcctgctgccctgcaagtcctctgtgcccctcaggatgctgtcctgtcctccttccgggactccagggccagatccatggctgtgatacagtgcactgtggacagtgagccacctgctgagctggccctatctcatgatggcaaggtgctggccacgagcagcggggtccacagcttggcatcagggacaggccatgtccaggtggcccgaaacgccctacggctgcaggtgcaagatgtgcctgcaggtgatgacacctatgtttgcacagcccaaaacttgctgggctcaatcagcaccatcgggcggttgcaggtagaaggtgagtggcgcgtggtggcagagcctggcctggacgtgcctgagggcgctgccctgaacctcagctgccgcctcctgggtggccctgggcctgtgggcaactccacctttgcatggttctggaatgaccggcggctgcacgcggagcctgtgcccactctcgccttcacccacgtggctcgtgctcaagctgggatgtaccactgcctggctgagctccccactggggctgctgcctctgctccagtcatgctccgtgtgctctaccctcccaagacgcccaccatgatggtcttcgtggagcctgagggtggcctccggggcatcctggattgccgagtggacagcgagccgctcgccagcctgactctccaccttggcagtcgactggtggcctccagtcagccccagggtgctcctgcagagccacacatccatgtcctggcttcccccaatgccctgagggtggacatcgaggcgctgaggcccagcgaccaaggggaatacatctgttctgcctcaaatgtcctgggccctgcctctacctccacctactttggggtcagagccctgcaccgcctgcatcagttccagcagctgctctgggtcctgggactgctggtgggcctcctgctcctgctgttgggcctgggggcctgctacacctggagaaggaggcgtgtttgtaagcagagcatgggcgagaatccagggcgggcatcgtctttccatttactgcctctagctgggtcttcaaggtga

SEQ ID NO: 412 - protein, 1700 aa, Homo sapiens; identical to SEQ ID NO: 398

SEQ ID NO: 413 - DNA, 5103 bp, Homo sapiens
  CDS (1)..(5100)
atgggcttcttgcccaagcttctcctcctggcctcagccgttcttcccccaggccaggcctcatggggcgtctccagtccccaggacgtgcagggtgtgaaggggtcttgcctgcttatcccctgcatcttcagcttccctgccgacgtggaggtgcccgacggcatcacggccatctggtactacgactactcgggccagcggcaggtggtgagccactcggcggaccccaagctggtggaggcccgcttccgcggccgcaccgagttcatggggaaccccgagcacagggtgtgcaacctgctgctgaaggacctgcagcccgaggactctggttcctacaacttccgcttcgagatcagtgaggtcaaccgctggtcagatgtgaaaggcaccttggtcacagtaacaggtgatcccagggtgcccaccattgcctccccggtggagcttctcgagggcacagaggtggacttcaactgctccactccctacgtatgcctgcaggagcaggtcagactgcagtggcaaggccaggaccctgctcgctctgtcaccttcaacagccagaagtttgagcccaccggcgtcggccacctggagaccctccacatggccatgtcctggcaggaccacggccggatcctgcgctgccagctctccgtggccaatcacagggctcagagcgagattcacctccaagtgaagtgtgcccccaagggtgtgaagatcctcctcagcccctcggggaggaacatccttccaggtgagctggtcacactcacctgccaggtgaacagcagctaccctgcagtcagttccattaagtggctcaaggatggggtacgcctccaaaccaagactggtgtgctgcacctgccccaggcagcctggagcgatgctggcgtctacacctgccaagctgagaacggcgtgggctctttggtctcaccccccatcagcctccacatcttcgtggctgaggtccaggtgagcccagcaggtcccatcctggagaaccagacagtgacactagtctgcaacacacccaatgaggcacccagtgatctccgctacagctggtacaagaaccatgtcctgctggaggatgcccactcccataccctccggctgcacttggccactagggctgatactggcttctacttctgtgaggtgcagaacgtccatggcagcgagcgctcgggccctgtcagcgtggtagtcacagacccgcctctcactccagtcctgacagccttcctggagacccaggcgggacttgtgggcatccttcactgctctgtggtcagtgagcccctggccacactggtgctgtcacatgggggtcatatcctggcctccacctccggggacagtgatcacagcccacgcttcagtggtacctctggtcccaactccctgcgcctggagatccgagacctggaggaaactgacagtggggagtacaagtgctcagccaccaactcccttggaaatgcaacctccaccctggacttccatgccaatgtcgcccgtctcctcatcagcccggcagccgaggtggtggaaggacaggcagtgacactgagctgcagaagcggcctaagccccacacctgatgcccgcttctcctggtacctgaatggagccctgcttcacgagggtcccggcagcagcctcctgctccccgcggcctccagcactgacgccggctcataccactgccgggcccgggacggccacagtgccagtggcccctcttcgccagctgttctcactgtgctctgtgagcagccaccacgacaaccaacattcaccaccaggctggaccttgatgccgctggggccggggctggacggcgaggcctccttttgtgccgtgtggacagcgacccccccgccaggctgcagctgctccacaaggaccgtgttgtggccacttccctgccatcagggggtggctgcagcacctgtgggggctgttccccacgcatgaaggtcaccaaagcccccaacttgctgcgtgtggagattcacaaccctttgctggaagaggagggcttgtacctctgtgaggccagcaatgccctgggcaacgcctccacctcagccaccttcaatggccaggccactgtcctggccattgcaccatcacacacacttcaggagggcacagaagccaacttgacttgcaacgtgagccgggaagctgctggcagccctgctaacttctcctggttccgaaatggggtgctgtgggcccagggtcccctggagaccgtgacactgctgcccgtggccagaactgatgctgccctttacgcctgccgcatcctgactgaggctggtgcccagctctccactcccgtgctcctgagtgtactctatcccccggaccgtccaaagctgtcagccctcctagacatgggccagggccacatggctctgttcatctgcactgtggacagccgccccctggccttgctggccttgttccatggggagcacctcctggccaccagcctgggtccccaggtcccatcccatggtcggttccaggctaaagctgaggccaactccctgaagttagaggtccgagaactgggccttggggactctggcagctaccgctgtgaggccacaaatgttcttggatcatccaacacctcactcttcttccaggtccgaggtgcctgggtccaggtgtcaccatcacctgagctccaagagggccaggctgtggtcctgagctgccaggtacacacaggagtcccagaggggacctcatatcgttggtatcgggatggccagcccctccaggagtcgacctcggccacgctccgctttgcagccataactttgacacaagctggggcctatcattgccaagcccaggccccaggctcagccaccacgagcctagctgcacccatcagcctccacgtgtcctgtaaggatgccccacgccacgtcacactcactaccctgatggacacaggccctggacgactgggcctcctcctgtgccgtgtggacagtgaccctccggcccagctgcggctgctccacggggatcgccttgtggcctccaccctacaaggtgtggggggacccgaaggcagctctcccaggctgcatgtggctgtggcccccaacacactgcgtctggagatccacggggctatgctggaggatgagggtgtctatatctgtgaggcctccaacaccctgggccaggcctcggcctcagctgacttcgacgctcaaagctgtgaatgtgcaggtgtggcccggggctaccgtgcgggaggggcagctggtgaacctgacctgccttgtgtggaccactcacccggcccagctcacctacacatggtaccaggatgggcagcagcgcctggatgcccactccatccccctgcccaacgtcacagtcagggatgccacctcctaccgctgcggtgtgggcccccctggtcgggcaccccgcctctccagacctatcaccttggacgtcctcacgcgccccgcaacctgcgcctgacctacctcctggagagccatggcgggcagctggccctggtactgtgcactgtggacagccgcccgcccgcccagctggccctcagccacgccggtcgcctcttggcctcctcgacagcagcctctgtccccaacaccctgcgcctggagctgcgagggccacagcccagggatgagggtttctacagctgctctgcccgcagccctctgggccaggccaacacgtccctggagctgcggctggaggtgcgggtgatcctggctccggaggctgccgtgcctgaaggtgcccccatcacagtgacctgtgcggaccctgctgcccacgcacccacactctatacttggtaccacaacggtcgttggctgcaggagggtccagctgcctcactctcattcctggtggccacgcgggctcatgcaggcgcctactcttgccaggcccaggatgcccagggcacccgcagctcccgtcctgctgccctgcaagtcctctgtgcccctcaggacgctgtcctgtcctccttccgggactccagggccagatccatggctgtgatacagtgcactgtggacagtgagccacctgctgagctggccctatctcatgatggcaaggtgctggccacgagcagcggggtccacagcttggcatcagggacaggccatgtccaggtggcccgaaacgccctacggctacaggtgcaagatgtgcctgcaggtgatgacacctatgtttgcacagcccaaaacttgctgggctcaatcagcaccatcgggcggttgcaggtagaaggtgagtggcgcgtggtggcagagcctggcctggacgtgcctgagggcgctgccctgaacctcagctgccgcctcctgggtggccctgggcctgtgggcaactccacctttgcatggttctggaatgaccggcggctgcacgcggagcctgtgcccactctcgccttcacccacgtggctcgtgctcaagctgggatgtaccactgcctggctgagctccccactggggctgctgcctctgctccagtcatgctccgtgtgctctaccctcccaagacgcccaccatgatggtcttcgtggagcctgagggtggcctccggggcatcctggattgccgagtggacagcgagccgctcgccagcctgactctccaccttggcagtcgactggtggcctccagtcagccccagggtgctcctgcagagccacacatccatgtcctggcttcccccaatgccctgagggtggacatcgaggcgctgaggcccagcgaccaaggggaatacatctgttctgcctcaaatgtcctgggccctgcctctacctccacctactttggggtcagagccctgcaccgcctgcatcagttccagcagctgctctgggtcctgggactgctggtgggcctcctgctcctgctgttgggcctgggggcctgctacacctggagaaggaggcgtgtttgtaagcagagcatgggcgagaatccagggcgggcatcgtctttccatttactgcctctagctgggtcttcaaggtga

SEQ ID NO: 414 - protein, 1700 aa, Homo sapiens; identical to SEQ ID NO: 398

SEQ ID NO: 415 - DNA, 5103 bp, Homo sapiens
  CDS (1)..(5100)
atgggcttcttgcccaagcttctcctcctggcctcagccgttcttcccccaggccaggcctcatggggcgtctccagtccccaggacgtgcagggtgtgaaggggtcttgcctgcttatcccctgcatcttcagcttccctgccgacgtggaggtgcccgacggcatcacggccatctggtactacgactactcgggccagcggcaggtggtgagccactcggcggaccccaagctggtggaggcccgcttccgcggccgcaccgagttcatggggaaccccgagcacagggtgtgcaacctgctgctgaaggacctgcagcccgaggactctggttcctacaacttccgcttcgagatcagtgaggtcaaccgctggtcagatgtgaaaggcaccttggtcacagtaacaggtgatcccagggtgcccaccattgcctccccggtggagcttctcgagggcacagaggtggacttcaactgctccactccctacgtatgcctgcaggagcaggtcagactgcagtggcaaggccaggaccctgctcgctctgtcaccttcaacagccagaagtttgagcccaccggcgtcggccacctggagaccctccacatggccatgtcctggcaggaccacggccggatcctgcgctgccagctctccgtggccaatcacagggctcagagcgagattcacctccaagtgaagtgtgcccccaagggtgtgaagatcctcctcagcccctcggggaggaacatccttccaggtgagctggtcacactcacctgccaggtgaacagcagctaccctgcagtcagttccattaagtggctcaaggatggggtacgcctccaaaccaagactggtgtgctgcacctgccccaggcagcctggagcgatgctggcgtctacacctgccaagctgagaacggcgtgggctctttggtctcaccccccatcagcctccacatcttcgtggctgaggtccaggtgagcccagcaggtcccatcctggagaaccagacagtgacactagtctgcaacacacccaatgaggcacccagtgatctccgctacagctggtacaagaaccatgtcctgctggaggatgcccactcccataccctccggctgcacttggccactagggctgatactggcttctacttctgtgaggtgcagaacgtccatggcagcgagcgctcgggccctgtcagcgtggtagtcacagacccgcctctcactccagtcctgacagccttcctggagacccaggcgggacttgtgggcatccttcactgctctgtggtcagtgagcccctggccacactggtgctgtcacatgggggtcatatcctggcctccacctccggggacagtgatcacagcccacgcttcagtggtacctctggtcccaactccctgcgcctggagatccgagacctggaggaaactgacagtggggagtacaagtgctcagccaccaactcccttggaaatgcaacctccaccctggacttccatgccaatgtcgcccgtctcctcatcagcccggcagccgaggtggtggaaggacaggcagtgacactgagctgcagaagcggcctaagccccacacctgatgcccgcttctcctggtacctgaatggagccctgcttcacgagggtcccggcagcagcctcctgctccccgcggcctccagcactgacgccggctcataccactgccgggcccgggacggccacagtgccagtggcccctcttcgccagctgttctcactgtgctctgtgagcagccaccacgacaaccaacattcaccaccaggctggaccttgatgccgctggggccggggctggacggcgaggcctccttttgtgccgtgtggacagcgacccccccgccaggctgcagctgctccacaaggaccgtgttgtggccacttccctgccatcagggggtggctgcagcacctgtgggggctgttccccacgcatgaaggtcaccaaagcccccaacttgctgcgtgtggagattcacaaccctttgctggaagaggagggcttgtacctctgtgaggccagcaatgccctgggcaacgcctccacctcagccaccttcaatggccaggccactgtcctggccattgcaccatcacacacacttcaggagggcacagaagccaacttgacttgcaacgtgagccgggaagctgctggcagccctgctaacttctcctggttccgaaatggggtgctgtgggcccagggtcccctggagaccgtgacactgctgcccgtggccagaactgatgctgccctttacgcctgccgcatcctgactgaggctggtgcccagctctccactcccgtgctcctgagtgtactctatcccccggaccgtccaaagctgtcagccctcctagacatgggccagggccacatggctctgttcatctgcactgtggacagccgccccctggccttgctggccttgttccatggggagcacctcctggccaccagcctgggtccccaggtcccatcccatggtcggttccaggctaaagctgaggccaactccctgaagttagaggtccgagaactgggccttggggactctggcagctaccgctgtgaggccacaaatgttcttggatcatccaacacctcactcttcttccaggtccgaggtgcctgggtccaggtgtcaccatcacctgagctccaagagggccaggctgtggtcctgagctgccaggtacacacaggagtcccagaggggacctcatatcgttggtatcgggatggccagcccctccaggagtcgacctcggccacgctccgctttgcagccataactttgacacaagctggggcctatcattgccaagcccaggccccaggctcagccaccacgagcctagctgcacccatcagcctccacgtgtcctgtaaggatgccccacgccacgtcacactcactaccctgatggacacaggccctggacgactgggcctcctcctgtgccgtgtggacagtgaccctccggcccagctgcggctgctccacggggatcgccttgtggcctccaccctacaaggtgtggggggacccgaaggcagctctcccaggctgcatgtggctgtggcccccaacacactgcgtctggagatccacggggctatgctggaggatgagggtgtctatatctgtgaggcctccaacaccctgggccaggcctcggcctcagctgacttcgacgctcaaagctgtgaatgtgcaggtgtggcccggggctaccgtgcgggaggggcagctggtgaacctgacctgccttgtgtggaccactcacccggcccagctcacctacacatggtaccaggatgggcagcagcgcctggatgcccactccatccccctgcccaacgtcacagtcagggatgccacctcctaccgctgcggtgtgggcccccctggtcgggcaccccgcctctccagacctatcaccttggacgtcctcacgcgccccgcaacctgcgcctgacctacctcctggagagccatggcgggcagctggccctggtactgtgcactgtggacagccgcccgcccgcccagctggccctcagccacgccggtcgcctcttggcctcctcgacagcagcctctgtccccaacaccctgcgcctggagctgcgagggccacagcccagggatgagggtttctacagctgctctgcccgcagccctctgggccaggccaacacgtccctggagctgcggctggaggtgcgggtgatcctggctccggaggctgccgtgcctgaaggtgcccccatcacagtgacctgtgcggaccctgctgcccacgcacccacactctatacttggtaccacaacggtcgttggctgcaggagggtccagctgcctcactctcattcctggtggccacgcgggctcatgcaggcgcctactcttgccaggcccaggatgcccagggcacccgcagctcccgtcctgctgccctgcaagtcctctgtgcccctcaggacgctgtcctgtcctccttccgggactccagggccagatccatggctgtgatacagtgcactgtggacagtgagccacctgctgagctggccctatctcatgatggcaaggtgctggccacgagcagcggggtccacagcttggcatcagggacaggccatgtccaggtggcccgaaacgccctacggctgcaggtgcaagatgtgcctgcaggtgatgacacctatgtttgcacagcccaaaacttgctgggctcaatcagcaccatcgggcggttgcaggtagaaggtgagtggcgcgtggtggcagagcctggcctggacgtgcctgagggcgctgccctgaacctcagctgccgcctcctgggtggccctgggcctgtgggcaactccacctttgcatggttctggaatgaccggcggctgcacgcggagcctgtgcccactctcgccttcacccacgtggctcgtgctcaagctgggatgtaccactgcctggctgagctccccactggggctgctgcctctgctccagtcatgctccgtgtgctctaccctcccaagacgcccaccatgatggtcttcgtggagcctgagggtggcctccggggcatcctggattgccgagtggacagcgagccgctcgccagcctgactctccaccttggcagtcgactggtggcctccagtcagccccagggtgctcctgcagagtcacacatccatgtcctggcttcccccaatgccctgagggtggacatcgaggcgctgaggcccagcgaccaaggggaatacatctgttctgcctcaaatgtcctgggccctgcctctacctccacctactttggggtcagagccctgcaccgcctgcatcagttccagcagctgctctgggtcctgggactgctggtgggcctcctgctcctgctgttgggcctgggggcctgctacacctggagaaggaggcgtgtttgtaagcagagcatgggcgagaatccagggcgggcatcgtctttccatttactgcctctagctgggtcttcaaggtga

SEQ ID NO: 416 - protein, 1700 aa, Homo sapiens
MGFLPKLLLLASAVLPPGQASWGVSSPQDVQGVKGSCLLIPCIFSFPADVEVPDGITAIWYYDYSGQRQVVSHSADPKLVEARFRGRTEFMGNPEHRVCNLLLKDLQPEDSGSYNFRFEISEVNRWSDVKGTLVTVTGDPRVPTIASPVELLEGTEVDFNCSTPYVCLQEQVRLQWQGQDPARSVTFNSQKFEPTGVGHLETLHMAMSWQDHGRILRCQLSVANHRAQSEIHLQVKCAPKGVKILLSPSGRNILPGELVTLTCQVNSSYPAVSSIKWLKDGVRLQTKTGVLHLPQAAWSDAGVYTCQAENGVGSLVSPPISLHIFVAEVQVSPAGPILENQTVTLVCNTPNEAPSDLRYSWYKNHVLLEDAHSHTLRLHLATRADTGFYFCEVQNVHGSERSGPVSVVVTDPPLTPVLTAFLETQAGLVGILHCSVVSEPLATLVLSHGGHILASTSGDSDHSPRFSGTSGPNSLRLEIRDLEETDSGEYKCSATNSLGNATSTLDFHANVARLLISPAAEVVEGQAVTLSCRSGLSPTPDARFSWYLNGALLHEGPGSSLLLPAASSTDAGSYHCRARDGHSASGPSSPAVLTVLCEQPPRQPTFTTRLDLDAAGAGAGRRGLLLCRVDSDPPARLQLLHKDRVVATSLPSGGGCSTCGGCSPRMKVTKAPNLLRVEIHNPLLEEEGLYLCEASNALGNASTSATFNGQATVLAIAPSHTLQEGTEANLTCNVSREAAGSPANFSWFRNGVLWAQGPLETVTLLPVARTDAALYACRILTEAGAQLSTPVLLSVLYPPDRPKLSALLDMGQGHMALFICTVDSRPLALLALFHGEHLLATSLGPQVPSHGRFQAKAEANSLKLEVRELGLGDSGSYRCEATNVLGSSNTSLFFQVRGAWVQVSPSPELQEGQAVVLSCQVHTGVPEGTSYRWYRDGQPLQESTSATLRFAAITLTQAGAYHCQAQAPGSATTSLAAPISLHVSCKDAPRHVTLTTLMDTGPGRLGLLLCRVDSDPPAQLRLLHGDRLVASTLQGVGGPEGSSPRLHVAVAPNTLRLEIHGAMLEDEGVYICEASNTLGQASASADFDAQSCECAGVARGYRAGGAAGEPDLPCVDHSPGPAHLHMVPGWAAAPGCPLHPPAQRHSQGCHLLPLRCGPPWSGTPPLQTYHLGRPHAPRNLRLTYLLESHGGQLALVLCTVDSRPPAQLALSHAGRLLASSTAASVPNTLRLELRGPQPRDEGFYSCSARSPLGQANTSLELRLEVRVILAPEAAVPEGAPITVTCADPAAHAPTLYTWYHNGRWLQEGPAASLSFLVATRAHAGAYSCQAQDAQGTRSSRPAALQVLCAPQDAVLSSFRDSRARSMAVIQCTVDSEPPAELALSHDGKVLATSSGVHSLASGTGHVQVARNALRLQVQDVPAGDDTYVCTAQNLLGSISTIGRLQVEGEWRVVAEPGLDVPEGAALNLSCRLLGGPGPVGNSTFAWFWNDRRLHAEPVPTLAFTHVARAQAGMYHCLAELPTGAAASAPVMLRVLYPPKTPTMMVFVEPEGGLRGILDCRVDSEPLASLTLHLGSRLVASSQPQGAPAESHIHVLASPNALRVDIEALRPSDQGEYICSASNVLGPASTSTYFGVRALHRLHQFQQLLWVLGLLVGLLLLLLGLGACYTWRRRRVCKQSMGENPGRASSFHLLPLAGSSR

SEQ ID NO: 417 - DNA, 5103 bp, Homo sapiens
  CDS (1)..(5100)
atgggcttcttgcccaagcttctcctcctggcctcagccgttcttcccccaggccaggcctcatggggcgtctccagtccccaggacgtgcagggtgtgaaggggtcttgcctgcttatcccctgcatcttcagcttccctgccgacgtggaggtgcccgacggcatcacggccatctggtactacgactactcgggccagcggcaggtggtgagccactcggcggaccccaagctggtggaggcccgcttccgcggccgcaccgagttcatggggaaccccgagcacagggtgtgcaacctgctgctgaaggacctgcagcccgaggactctggttcctacaacttccgcttcgagatcagtgaggtcaaccgctggtcagatgtgaaaggcaccttggtcacagtaacaggtgatcccagggtgcccaccattgcctccccggtggagcttctcgagggcacagaggtggacttcaactgctccactccctacgtatgcctgcaggagcaggtcagactgcagtggcaaggccaggaccctgctcgctctgtcaccttcaacagccagaagtttgagcccaccggcgtcggccacctggagaccctccacatggccatgtcctggcaggaccacggccggatcctgcgctgccagctctccgtggccaatcacagggctcagagcgagattcacctccaagtgaagtgtgcccccaagggtgtgaagatcctcctcagcccctcggggaggaacatccttccaggtgagctggtcacactcacctgccaggtgaacagcagctaccctgcagtcagttccattaagtggctcaaggatggggtacgcctccaaaccaagactggtgtgctgcacctgccccaggcagcctggagcgatgctggcgtctacacctgccaagctgagaacggcgtgggctctttggtctcaccccccatcagcctccacatcttcgtggctgaggtccaggtgagcccagcaggtcccatcctggagaaccagacagtgacactagtctgcaacacacccaatgaggcacccagtgatctccgctacagctggtacaagaaccatgtcctgctggaggatgcccactcccataccctccggctgcacttggccactagggctgatactggcttctacttctgtgaggtgcagaacgtccatggcagcgagcgctcgggccctgtcagcgtggtagtcacagacccgcctctcactccagtcctgacagccttcctggagacccaggcgggacttgtgggcatccttcactgctctgtggtcagtgagcccctggccacactggtgctgtcacatgggggtcatatcctggcctccacctccggggacagtgatcacagcccacgcttcagtggtacctctggtcccaactccctgcgcctggagatccgagacctggaggaaactgacagtggggagtacaagtgctcagccaccaactcccttggaaatgcaacctccaccctggacttccatgccaatgtcgcccgtctcctcatcagcccggcagccgaggtggtggaaggacaggcagtgacactgagctgcagaagcggcctaagccccacacctgatgcccgcttctcctggtacctgaatggagccctgcttcacgagggtcccggcagcagcctcctgctccccgcggcctccagcactgacgccggctcataccactgccgggcccgggacggccacagtgccagtggcccctcttcgccagctgttctcactgtgctctgtgagcagccaccacgacaaccaacattcaccaccaggctggaccttgatgccgctggggccggggctggacggcgaggcctccttttgtgccgtgtggacagcgacccccccgccaggctgcagctgctccacaaggaccgtgttgtggccacttccctgccatcagggggtggctgcagcacctgtgggggctgttccccacgcatgaaggtcaccaaagcccccaacttgctgcgtgtggagattcacaaccctttgctggaagaggagggcttgtacctctgtgaggccagcaatgccctgggcaacgcctccacctcagccaccttcaatggccaggccactgtcctggccattgcaccatcacacacacttcaggagggcacagaagccaacttgacttgcaacgtgagccgggaagctgctggcagccctgctaacttctcctggttccgaaatggggtgctgtgggcccagggtcccctggagaccgtgacactgctgcccgtggccagaactgatgctgccctttacgcctgccgcatcctgactgaggctggtgcccagctctccactcccgtgctcctgagtgtactctatcccccggaccgtccaaagctgtcagccctcctagacatgggccagggccacatggctctgttcatctgcactgtggacagccgccccctggccttgctggccttgttccatggggagcacctcctggccaccagcctgggtccccaggtcccatcccatggtcggttccaggctaaagctgaggccaactccctgaagttagaggtccgagaactgggccttggggactctggcagctaccgctgtgaggccacaaatgttcttggatcatccaacacctcactcttcttccaggtccgaggtgcctgggtccaggtgtcaccatcacctgagctccaagagggccaggctgtggtcctgagctgccaggtacacacaggagtcccagaggggacctcatatcgttggtatcgggatggccagcccctccaggagtcgacctcggccacgctccgctttgcagccataactttgacacaagctggggcctatcattgccaagcccaggccccaggctcagccaccacgagcctagctgcacccatcagcctccacgtgtcctgtaaggatgccccacgccacgtcacactcactaccctgatggacacaggccctggacgactgggcctcctcctgtgccgtgtggacagtgaccctccggcccagctgcggctgctccacggggatcgccttgtggcctccaccctacaaggtgtggggggacccgaaggcagctctcccaggctgcatgtggctgtggcccccaacacactgcgtctggagatccacggggctatgctggaggatgagggtgtctatatctgtgaggcctccaacaccctgggccaggcctcggcctcagctgacttcgacgctcaaagctgtgaatgtgcaggtgtggcccggggctaccgtgcgggaggggcagctggtgaacctgacctgccttgtgtggaccactcacccggcccagctcacctacacatggtaccaggatgggcagcagcgcctggatgcccactccatccccctgcccaacgtcacagtcagggatgccacctcctaccgctgcggtgtgggcccccctggtcgggcaccccgcctctccagacctatcaccttggacgtcctcacgcgccccgcaacctgcgcctgacctacctcctggagagccatggcgggcagctggccctggtactgtgcactgtggacagccgcccgcccgcccagctggccctcagccacgccggtcgcctcttggcctcctcgacagcagcctctgtccccaacaccctgcgcctggagctgcgagggccacagcccagggatgagggtttctacagctgctctgcccgcagccctctgggccaggccaacacgtccctggagctgcggctggaggtgcgggtgatcctggctccggaggctgccgtgcctgaaggtgcccccatcacagtgacctgtgcggaccctgctgcccacgcacccacactctatacttggtaccacaacggtcgttggctgcaggagggtccagctgcctcactctcattcctggtggccacgcgggctcatgcaggcgcctactcttgccaggcccaggatgcccagggcacccgcagctcccgtcctgctgccctgcaagtcctctgtgcccctcaggacgctgtcctgtcctccttccgggactccagggccagatccatggctgtgatacagtgcactgtggacagtgagccacctgctgagctggccctatctcatgatggcaaggtgctggccacgagcagcggggtccacagcttggcatcagggacaggccatgtccaggtggcccgaaacgccctacggctgcaggtgcaagatgtgcctgcaggtgatgacacctatgtttgcacagcccaaaacttgctgggctcaatcagcaccatcgggcggttgcaggtagaaggtgagtggcgcgtggtggcagagcctggcctggacgtgcctgagggcgctgccctgaacctcagctgccgcctcctgggtggccctgggcctgtgggcaactccacctttgcatggttctggaatgaccggcggctgcacgcggagcctgtgcccactctcgccttcacccacgtggctcgtgctcaagctgggatgtaccactgcctggctgagctccccactggggctgctgcctctgctccagtcatgctccgtgtgctctaccctcccaagacgcccaccatgatggtcttcgtggagcctgagggtggcctccggggcatcctggattgccgagtggacagcgagccgctcgccagcctgactctccaccttggcagtcgactggtggcctccagtcagccccagggtgctcctgcagagccacacatccatgtcctggcttcccccaatgccctgagggtggacatcgaggcgctgaggcccagcgaccaaggggaatacatctgttctgcctcaaatgtcctgggccctgcttctacctccacctactttggggtcagagccctgcaccgcctgcatcagttccagcagctgctctgggtcctgggactgctggtgggcctcctgctcctgctgttgggcctgggggcctgctacacctggagaaggaggcgtgtttgtaagcagagcatgggcgagaatccagggcgggcatcgtctttccatttactgcctctagctgggtcttcaaggtga

SEQ ID NO: 418 - protein, 1700 aa, Homo sapiens; identical to SEQ ID NO: 398

SEQ ID NO: 419 - DNA, 1511 bp, Homo sapiens
  CDS (339)..(1202)
agagaaggagctaagaagcctgtggctactgagaagaggccagctaagtgatgctggcatgtaggaagcaggcacactacttgtggatggggagcatggtgactggagagaccagtgagggcaatttgcatcctttgagggcaatttggtctccaaagaacagagtgatctggagggagtgacagccaagagtcagccagagcatctcagccatcccaggaatcagagaaatccagggaagccagtcttaatatgatggaaacatctctgaacttctaaaagaccaaggttggcgttttagctctattaattttacttcgtcttggccagaattcacaatgacaacagtgacagtgaccacagaaattcccccaagggataagatggaagataattctgccttgtatgagtctacgtccgctcacattattgaagaaaccgagtatgtgaaaaagattcgaactactctgcaaaagatcaggacccagatgtttaaagatgaaataagacatgacagtacaaatcacaaactagatgcaaagctgcaagcctccagagaagcaggagcagcagctctgagaaacgtggcccagagattatttgaaaactaccaaacgcaatctgaagaagtgagaaagaagcaggaggacagtaaacaattactccaggttaacaagcttgaaaaagaacagaaattgaaacaacatgttgaaaatctgaatcaagttgctgaaaaacttgaagaaaaacacagtcaaattacagaattggagaaccttgtacagagaatggaaaaggaaaagagaacactactagaaagaaaactgtctttggaaaacaagctactgcaactcaaatccagtgctacatatggaaaaagttgccaggatcttcagagggagatttccattctccaggagcagatctctcatctgcagtttgtgattcactcccaacatcagaacctgcgcagtgtcatccaggagatggaaggattaaaaaataatttaaaagaacaagacaaaagaattgaaaatctcagagaaaaggttaacatacttgaagcccagaataaagaactaaaaacccaggtagcactttcatctgaaactcctaggacaaaggtatctaaggctgtctctacaagtgaattgaagaccgaaggtgtttccccttatttaatgttgattaggttacggaaatgaactggctggatgaagatctgatttagaaagactgcgtgagtcttatttattctctgaaacacagcccaagtttcatgttaaaatggcaaaatgccattatttaaatggaacttattacataccaatggctttgcaagaagatgacatttcagaaaatcaaacaaatctatatttaatggatggactcttcaaaacttaccaaatagttgaagaaaccaggtgccttctcatgatggaagacagattctgctttaaattaaaaaaaaaaaaatctgaatcttgttttcagatttttttttctactgg

SEQ ID NO: 420 - protein, 288 aa, Homo sapiens
MTTVTVTTEIPPRDKMEDNSALYESTSAHIIEETEYVKKIRTTLQKIRTQMFKDEIRHDSTNHKLDAKLQASREAGAAALRNVAQRLFENYQTQSEEVRKKQEDSKQLLQVNKLEKEQKLKQHVENLNQVAEKLEEKHSQITELENLVQRMEKEKRTLLERKLSLENKLLQLKSSATYGKSCQDLQREISILQEQISHLQFVIHSQHQNLRSVIQEMEGLKNNLKEQDKRIENLREKVNILEAQNKELKTQVALSSETPRTKVSKAVSTSELKTEGVSPYLMLIRLRK

SEQ ID NO: 421 - DNA, 705 bp, Homo sapiens
  CDS (3)..(422)
tacaaagaatggaaaaggaaaagagaacactactagaaagaaaactgtctttggaaaacaagctactgcaactcaaatccagtgctacatatggaaaaagttgccaggatcttcagagggagatttccattctccaggagcagatctctcatctgcagtttgtgattcactcccaacatcagaacctgcgcagtgtcatccaggagatggaaggattaaaaaataatttaaaagaacaagacaaaagaattgaaaatctcagagaaaaggttaacatacttgaagcccagaataaagaactaaaaacccaggtagcactttcatctgaaactcctaggacaaaggtatctaaggctgtctctacaagtgaattgaagaccgaaggtgtttccccttatttaatgttgattaggttacggaaatgaactggctggatgaagatctgatttagaaagactgcgtgagtcttatttattctctgaaacacagcccaagtttcatgttaaaatggcaaaatgccattatttaaatggaacttattacataccaatggctttgcaagaagatgacatttcagaaaatcaaacaaatctatatttaatggatggactcttcaaaacttaccaaatagttgaagaaaccaggtgccttctcatgatggaagacagattctgctttaaattaaaaaaaaaaaaatctgaaaaa

SEQ ID NO: 422 - protein, 140 aa, Homo sapiens
QRMEKEKRTLLERKLSLENKLLQLKSSATYGKSCQDLQREISILQEQISHLQFVIHSQHQNLRSVIQEMEGLKNNLKEQDKRIENLREKVNILEAQNKELKTQVALSSETPRTKVSKAVSTSELKTEGVSPYLMLIRLRK

SEQ ID NO: 423 - DNA, 1080 bp, Homo sapiens
  CDS (45)..(797)
gtttaaagatgaaatgagacatgacagtacaaatcacaaactagatgcaaagtttggatttgcttatgaaaaagataaaaggaaaagacctacagctcttagaaatgaacaaagagaatgaagtattgaaaatcaagctgcaagcctccagagaagcaggagcagcagctctgagaaacgtggcccagagattatttgaaaactaccaaacgcaatctgaagaagtgagaaagaagcaggagggcagtaaacaattactccaggttaacaagcttgaaaaagaacagaaattgaaacaacatgttgaaaatctgaatcaagttgctgaaaaacttgaagaaaaacacagtcaaattacagaattggagaaccttgtacagagaatggaaaaggaaaagagaacactactagaaagaaaactgtctttggaaaacaagctactgcaactcaaatccagtgctacatatggaaaaagttgccaggatcttcagagggagatttccattctccaggagcagatctctcatctgcagtttgtgattcactcccaacatcagaacctgcgcagtgtcatccaggagatggaaggattaaaaaataatttaaaagaacaagacaaaagaattgaaaatctcagagaaaaggttaacatacttgaagcccagaataaagaactaaaaacccaggtagcactttcatctgaaactcctaggacaaaggtatctaaggctgtctctacaagtgaattgaagaccgaaggtgtttccccttatttaatgttgattaggttacggaaatgaactggctggatgaagatctgatttagaaagactgcgtgagtcttatttattctctgaaacacagcccaagtttcatgttaaaatggcaaaatgccattatttaaatggaacttattacataccaatggctttgcaagaagatgacatttcagaaaatcaaacaaatctatatttaatggatggactcttcaaaacttaccaaatagttgaagaaaccaggtgccttctcatgatggaagacagattctgctttaaattaaaaaaaaaaaaatctgaaaaa

SEQ ID NO: 424 - protein, 251 aa, Homo sapiens
MQSLDLLMKKIKGKDLQLLEMNKENEVLKIKLQASREAGAAALRNVAQRLFENYQTQSEEVRKKQEGSKQLLQVNKLEKEQKLKQHVENLNQVAEKLEEKHSQITELENLVQRMEKEKRTLLERKLSLENKLLQLKSSATYGKSCQDLQREISILQEQISHLQFVIHSQHQNLRSVIQEMEGLKNNLKEQDKRIENLREKVNILEAQNKELKTQVALSSETPRTKVSKAVSTSELKTEGVSPYLMLIRLRK

SEQ ID NO: 425 - DNA, 1442 bp, Homo sapiens
  CDS (155)..(1159)
gcccaggggaggagcagcaccgggaccccgcgtcggctgggcgccccacaagggaagccagtcttaatatgatggaaacatctctgaacttctaaaagaccaaggttggcgttttagctctattaattttacttcgtcttggccagaattcacaatgacaacagtgacagtgaccacagaaattcccccaagggataagatggaagataattctgccttgtatgagtctacgtccgctcacattattgaagaaaccgagtatgtgaaaaagattcgaactactctgcaaaagatcaggacccagatgtttaaagatgaaataagacatgacagtacaaatcacaaactagatgcaaagcactgtggaaaccttcaacagggctctgattctgaaatggatccttcttgttgcagtttggatttgcttatgaaaaagataaaaggaaaagacctacagctcttagaaatgaacaaagagaatgaagtattgaaaatcaagctgcaagcctccagagaagcaggagcagcagctctgagaaacgtggcccagagattatttgaaaactaccaaacgcaatctgaagaagtgagaaagaagcaggaggacagtaaacaattactccaggttaacaagcttgaaaaagaacagaaattgaaacaacatgttgaaaatctgaatcaagttgctgaaaaacttgaagaaaaacacagtcaaattacagaattggagaaccttgtacagagaatggaaaaggaaaagagaacactactagaaagaaaactgtctttggaaaacaagctactgcaactcaaatccagtgctacatatggaaaaagttgccaggatcttcagagggagatttccattctccaggagcagatctctcatctgcagtttgtgattcactcccaacatcagaacctgcgcagtgtcatccaggagatggaaggattaaaaaataatttaaaagaacaagacaaaagaattgaaaatctcagagaaaaggttaacatacttgaagcccagaataaagaactaaaaacccaggtagcactttcatctgaaactcctaggacaaaggtatctaaggctgtctctacaagtgaattgaagaccgaaggtgtttccccttatttaatgttgattaggttacggaaatgaactggctggatgaagatctgatttagaaagactgcgtgagtcttatttattctctgaaacacagcccaagtttcatgttaaaatggcaaaatgccattatttaaatggaacttattacataccaatggctttgcaagaagatgacatttcagaaaatcaaacaaatctatatttaatggatggactcttcaaaacttaccaaatagttgaagaaaccaggtgccttctcatgatggaagacagattctgctttaaattaaaaaaaaaaaaatctgaaaaa

SEQ ID NO: 426 - protein, 335 aa, Homo sapiens
MTTVTVTTEIPPRDKMEDNSALYESTSAHIIEETEYVKKIRTTLQKIRTQMFKDEIRHDSTNHKLDAKHCGNLQQGSDSEMDPSCCSLDLLMKKIKGKDLQLLEMNKENEVLKIKLQASREAGAAALRNVAQRLFENYQTQSEEVRKKQEDSKQLLQVNKLEKEQKLKQHVENLNQVAEKLEEKHSQITELENLVQRMEKEKRTLLERKLSLENKLLQLKSSATYGKSCQDLQREISILQEQISHLQFVIHSQHQNLRSVIQEMEGLKNNLKEQDKRIENLREKVNILEAQNKELKTQVALSSETPRTKVSKAVSTSELKTEGVSPYLMLIRLRK

SEQ ID NO: 427 - DNA, 1482 bp, Homo sapiens
  CDS (195)..(1199)
gtgtgtgggtgtccaggtgcctttccagcggcttccccagtggagttcctggcatcaaggacatttcctgtaaaagggtccttgttgaagagggaagccagtcttaatatgatggaaacatctctgaacttctaaaagaccaaggttggcgttttagctctattaattttacttcgtcttggccagaattcacaatgacaacagtggcagtgaccacagaaattcccccaagggataagatggaagataattctgccttgtatgagtctacgtccgctcacattattgaagaaaccgagtatgtgaaaaagattcgaactactctgcaaaagatcaggacccagatgtttaaagatgaaataagacatgacagtacaaatcacaaactagatgcaaagcactgtggaaaccttcaacagggctctgattctgaaatggatccttcttgttgcagtttggatttgcttatgaaaaagataaaaggaaaagacctacagctcttagaaatgaacaaagagaatgaagtattgaaaatcaagctgcaagcctccagagaagcaggagcagcagctctgagaaacgtggcccagagattatttgaaaactaccaaacgcaatctgaagaagtgagaaagaagcaggaggacagtaaacaattactccaggttaacaagcttgaaaaagaacagaaattgaaacaacatgttgaaaatctgaatcaagttgctgaaaaacttgaagaaaaacacagtcaaattacagaattggagaaccttgtacagagaatggaaaaggaaaagagaacactactagaaagaaaactgtctttggaaaacaagctactgcaactcaaatccagtgctacatatggaaaaagttgccaggatcttcagagggagatttccattctccaggagcagatctctcatctgcagtttgtgattcactcccaacatcagaacctgcgcagtgtcatccaggagatggaaggattaaaaaataatttaaaagaacaagacaaaagaattgaaaatctcagagaaaaggttaacatacttgaagcccagaataaagaactaaaaacccaggtagcactttcatctgaaactcctaggacaaaggtatctaaggctgtctctacaagtgaattgaagaccgaaggtgtttccccttatttaatgttgattaggttacggaaatgaactggctggatgaagatctgatttagaaagactgcgtgagtcttatttattctctgaaacacagcccaagtttcatgttaaaatggcaaaatgccattatttaaatggaacttattacataccaatggctttgcaagaagatgacatttcagaaaatcaaacaaatctatatttaatggatggactcttcaaaacttaccaaatagttgaagaaaccaggtgccttctcatgatggaagacagattctgctttaaattaaaaaaaaaaaaatctgaaaaa

SEQ ID NO: 428 - protein, 335 aa, Homo sapiens
MTTVAVTTEIPPRDKMEDNSALYESTSAHIIEETEYVKKIRTTLQKIRTQMFKDEIRHDSTNHKLDAKHCGNLQQGSDSEMDPSCCSLDLLMKKIKGKDLQLLEMNKENEVLKIKLQASREAGAAALRNVAQRLFENYQTQSEEVRKKQEDSKQLLQVNKLEKEQKLKQHVENLNQVAEKLEEKHSQITELENLVQRMEKEKRTLLERKLSLENKLLQLKSSATYGKSCQDLQREISILQEQISHLQFVIHSQHQNLRSVIQEMEGLKNNLKEQDKRIENLREKVNILEAQNKELKTQVALSSETPRTKVSKAVSTSELKTEGVSPYLMLIRLRK

SEQ ID NO: 429 - DNA, 1511 bp, Homo sapiens
  CDS (339)..(1202)
agagaaggagctaagaagcctgtggctactgagaagaggccagctaagtgatgctggcatgtaggaagcaggcacactacttgtggatggggagcatggtgactggagagaccagtgagggcaatttgcatcctttgagggcaatttggtctccaaagaacagagtgatctggagggagtgacagccaagagtcagccagagcatctcagccatcccaggaatcagagaaatccagggaagccagtcttaatatgatggaaacatctctgaacttctaaaagaccaaggttggcgttttagctctattaattttacttcgtcttggccagaattcacaatgacaacagtgacagtgaccacagaaattcccccaagggataagatggaagataattctgccttgtatgagtctacgtccgctcacattattgaagaaaccgagtatgtgaaaaagattcgaactactctgcaaaagatcaggacccagatgtttaaagatgaaatgagacatgacagtacaaatcacaaactagatgcaaagctgcaagcctccagagaagcaggagcagcagctctgagaaacgtggcccagagattatttgaaaactaccaaacgcaatctgaagaagtgagaaagaagcaggaggacagtaaacaattactccaggttaacaagcttgaaaaagaacagaaattgaaacaacatgttgaaaatctgaatcaagttgctgaaaaacttgaagaaaaacacagtcaaattacagaattggagaaccttgtacagagaatggaaaaggaaaagagaacactactagaaagaaaactgtctttggaaaacaagctactgcaactcaaatccagtgctacatatggaaaaagttgccaggatcttcagagggagatttccattctccaggagcagatctctcatctgcagtttgtgattcactcccaacatcagaacctgcgcagtgtcatccaggagatggaaggattaaaaaataatttaaaagaacaagacaaaagaattgaaaatctcagagaaaaggttaacatacttgaagcccagaataaagaactaaaaacccaggtagcactttcatctgaaactcctaggacaaaggtatctaaggctgtctctacaagtgaattgaagaccgaaggtgtttccccttatttaatgttgattaggttacggaaatgaactggctggatgaagatctgatttagaaagactgcgtgagtcttatttattctctgaaacacagcccaagtttcatgttaaaatggcaaaatgccattatttaaatggaacttattacataccaatggctttgcaagaagatgacatttcagaaaatcaaacaaatctatatttaatggatggactcttcaaaacttaccaaatagttgaagaaaccaggtgccttctcatgatggaagacagattctgctttaaattaaaaaaaaaaaaatctgaatcttgttttcagatttttttttctactgg

SEQ ID NO: 430 - protein, 288 aa, Homo sapiens
MTTVTVTTEIPPRDKMEDNSALYESTSAHIIEETEYVKKIRTTLQKIRTQMFKDEMRHDSTNHKLDAKLQASREAGAAALRNVAQRLFENYQTQSEEVRKKQEDSKQLLQVNKLEKEQKLKQHVENLNQVAEKLEEKHSQITELENLVQRMEKEKRTLLERKLSLENKLLQLKSSATYGKSCQDLQREISILQEQISHLQFVIHSQHQNLRSVIQEMEGLKNNLKEQDKRIENLREKVNILEAQNKELKTQVALSSETPRTKVSKAVSTSELKTEGVSPYLMLIRLRK

SEQ ID NO: 431 - DNA, 1511 bp, Homo sapiens
  CDS (339)..(1202)
agagaaggagctaagaagcctgtggctactgagaagaggccagctaagtgatgctggcatgtaggaagcaggcacactacttgtggatggggagcatggtgactggagagaccagtgagggcaatttgcatcctttgagggcaatttggtctccaaagaacagagtgatctggagggagtgacagccaagagtcagccagagcatctcagccatcccaggaatcagagaaatccagggaagccagtcttaatatgatggaaacatctctgaacttctaaaagaccaaggttggcgttttagctctattaattttacttcgtcttggccagaattcacaatgacaacagtgacagtgaccacagaaattcccccaagggataagatggaagataattctgccttgtatgagtctacgtccgctcacattattgaagaaaccgagtatgtgaaaaagattcgaactactctgcaaaagatcaggacccagatgtttaaagatgaaataagacatgacagtacaaatcacaaactagatgcaaagctgcaagcctccagagaagcaggagcagcagctctgagaaacgtggcccagagattatttgaaaactaccaaacgcaatctgaagaagtgagaaagaagcaggaggacagtaaacaattactccaggttaacaagcttgaaaaagaacagaaattgaaacaacatgttgaaaatctgaatcaagttgctgaaaaacttgaagaaaaacacagtcaaattacagaattggagaaccttgtacagagaatggaaaaggaaaagagaacactactagaaagaaaactgtctttggaaaacaagctactgcaactcaaatccagtgctacatatggaaaaagttgccaggatcttcagagggagatttccattctccaggagcagatctctcatctgcagtttgtgattcactcccaacatcagaacctgcgcagtgtcatccaggagatggaaggattaaaaaataatttaaaagaacaagacaaaagaattgaaaatctcagagaaaaggttaacatacttgaagcccagaataaagaactaaaaacccaggtagcactttcatctgaaactcctaggacaaaggtatctaaggctgtctctacaagtgaattgaagaccgaaggtgtttccccttatttaatgttgattaggttacggaaatgaactggctggatgaagatctgatttagaaagactgcgtgagtcttatttattctctgaaacacagcccaagtttcatgttaaaatggcaaaatgccattatttaaatggaacttattacataccaatggctttgcaagaagatgacatttcagaagatcaaacaaatctatatttaatggatggactcttcaaaacttaccaaatagttgaagaaaccaggtgccttctcatgatggaagacagattctgctttaaattaaaaaaaaaaaaatctgaatcttgttttcagatttttttttctactgg

SEQ ID NO: 432 - protein, 288 aa, Homo sapiens; identical to SEQ ID NO: 420

SEQ ID NO: 433 - DNA, 2403 bp, Homo sapiens
  CDS (81)..(2291)
ggcacgagaagttaagctgaagaccgaagcaagagctggttcaggtggcagccacagcagcctcagggacctcagcaactatggcctcctgcccagactctgataatagctgggtgcttgctggctccgagagcctgccagtggagacactgggcccggcatccaggatggacccagaatctgagagagccctgcaggcccctcacagcccctccaagacagatgggaaagaattagctgggaccatggatggagaagggacgctcttccagactgaaagccctcagtctggcagcattctaacagaggagactgaggtcaagggcaccctggaaggtgatgtttgtggtgtggagcctcctggcccaggagacacagtagtccagggagacctgcaggagaccaccgtggtgacaggcctgggaccagacacacaggacctggaaggccagagccctccacagagcctgccttcaacccccaaagcagcttggatcagggaggagggccgctgctccagcagtgacgatgacaccgacgtggacatggagggtctgcggagacggcggggccgggaggccggcccacctcagcccatggtgcccctggctgtggagaaccaggctgggggtgagggtgcaggcggggagctgggcatctccctcaacatgtgcctccttggggccctggttctgcttggcctgggggtcctcctcttctcaggtggcctctcagagtctgagactgggcccatggaggaagtggagcggcaggtcctcccagaccccgaggtgctggaagctgtgggggacaggcaggatgggctaagggaacagctgcaggccccagtgcctcctgacagtgtccccagcctgcaaaacatgggtcttctgctggacaagctggccaaggagaaccaggacatccggctgctgcaggcccagctgcaggcccaaaaggaagagcttcagagcctgatgcaccagcccaaagggctagaggaggagaatgcccagctccggggggctctgcagcagggcgaagccttccagcgggctctggagtcagagctgcagcagctgcgggcccggctccaggggctggaggccgactgtgtccggggcccagatggggtgtgcctcagtggggatagaggcccacagggtgacaaggccatcagggagcaaggccccagggagcaggagccagaactcagcttcctgaagcagaaggaacagctggaggctgaggcacaggcattaaggcaagagttagagaggcagcgacggctgctggggtctgtacagcaggatctggagaggagcttgcaggatgccagccgcggggacccagctcatgctggcttggctgagctgggccacagattggcccagaaactgcagggcctggagaactggggccaggaccctggggtctctgccaatgcctcaaaggcctggcaccagaagtcccacttccagaattctagggagtggagtggaaaggaaaagtggtgggatgggcagagagaccggaaggctgagcactggaaacataagaaggaagaatctggccgggaaaggaagaagaactggggaggtcaggaggacagggagccagcaggaaggtggaaggagggcaggccaagggtggaggagtcggggagcaagaaggagggcaagcgacagggcccgaaggaacccccaaggaaaagtggtagcttccactcctctggagaaaagcagaagcaacctcggtggagggaagggactaaggacagccatgaccccctgccatcctgggcagagctgttgaggcccaagtaccgggcaccccagggctgctcaggtgtggacgagtgtgcccggcaggagggcttgactttctttggcacagagctagccccagtgcggcaacaggagctggcctctctgctaagaacatacttggcacggctgccctgggctgggcagctgaccaaggagctacccctctcacctgctttctttggtgaggatggcatcttccgtcatgaccgcctccgcttccgggattttgtggatgccctggaggacagcttggaggaggtggctgtgcaacagacaggtgatgatgatgaagtagatgactttgaggacttcatcttcagccacttctttggagacaaagcactgaagaagaggcctcttcctccccacaggtcagggaagaaggacaagcactcacagagcccaagagctgcggggcccagggaggggcacagccatagccaccaccaccaccaccggggctgacaccctgccccacagggaatggccttggcctggcccagcccaagatcccagcgttatccaactcctggagggtggactctgtcctggcttgtttggtgtcctcagatat

SEQ ID NO: 434 - protein, 737 aa, Homo sapiens
MASCPDSDNSWVLAGSESLPVETLGPASRMDPESERALQAPHSPSKTDGKELAGTMDGEGTLFQTESPQSGSILTEETEVKGTLEGDVCGVEPPGPGDTVVQGDLQETTVVTGLGPDTQDLEGQSPPQSLPSTPKAAWIREEGRCSSSDDDTDVDMEGLRRRRGREAGPPQPMVPLAVENQAGGEGAGGELGISLNMCLLGALVLLGLGVLLFSGGLSESETGPMEEVERQVLPDPEVLEAVGDRQDGLREQLQAPVPPDSVPSLQNMGLLLDKLAKENQDIRLLQAQLQAQKEELQSLMHQPKGLEEENAQLRGALQQGEAFQRALESELQQLRARLQGLEADCVRGPDGVCLSGDRGPQGDKAIREQGPREQEPELSFLKQKEQLEAEAQALRQELERQRRLLGSVQQDLERSLQDASRGDPAHAGLAELGHRLAQKLQGLENWGQDPGVSANASKAWHQKSHFQNSREWSGKEKWWDGQRDRKAEHWKHKKEESGRERKKNWGGQEDREPAGRWKEGRPRVEESGSKKEGKRQGPKEPPRKSGSFHSSGEKQKQPRWREGTKDSHDPLPSWAELLRPKYRAPQGCSGVDECARQEGLTFFGTELAPVRQQELASLLRTYLARLPWAGQLTKELPLSPAFFGEDGIFRHDRLRFRDFVDALEDSLEEVAVQQTGDDDEVDDFEDFIFSHFFGDKALKKRPLPPHRSGKKDKHSQSPRAAGPREGHSHSHHHHHRG

SEQ ID NO: 435 - DNA, 2739 bp, Homo sapiens
  CDS (670)..(2274)
ctgcaacaagttaagctgaagaccgaagcaagagctggttcaggtggcagccacagcagcctcagggacctcagcaactatggcctcctgcccagactctgataatagctgggtgcttgctggctccgagagcctgccagtggagacactgggcccggcatccaggatggacccagaatctgagagagccctgcaggcccctcacagcccctccaagacagatgggaaagaattagctgggaccatggatggagaagggacgctcttccagactgaaagccctcagtctggcagcattctaacagaggagactgaggtcaagggcaccctggaaggtgatgtttgtggtgtggagcctcctggcccaggagacacagtagtccagggagacctgcaggagaccaccgtggtgacaggcctgggaccagacacacaggacctggaaggccagagccctccacagagcctgccttcaacccccaaagcagcttggatcagggaggagggccgctgctccagcagtgacgatgacaccgacgtggacatggagggtctgcggagacggcggggccgggaggccggcccacctcagcccatggtgcccctggctgtggagaaccaggctgggggtgagggtgcaggcggggagctgggcattttcccctcaacatgtgcctccttggggccctggttctgcttggcctgggggtcctcctcttctcaggtggcctctcagagtctgagactgggcccatggaggaagtggagcggcaggtcctcccagaccccgaggtgctggaagctgtgggggacaggcaggatgggctaagggaacagctgcaggccccagtgcctcctgacagtgtccccagcctgcaaaacatgggtcttctgctggacaagctggccaaggagaaccaggacatccggctgctgcaggcccagctgcaggcccaaaaggaagagcttcagagcctgatgcaccagcccaaagggctagaggaggagaatgcccagctccggggggctctgcagcagggcgaagccttccagcgggctctggagtcagagctgcagcagctgcgggcccggctccaggggctggaggccgactgtgtccggggcccagatggggtgtgcctcagtgggggtagaggcccacagggtgacaaggccatcagggagcaaggccccagggagcaggagccagaactcagcttcctgaagcagaaggaacagctggaggctgaggcacaggcattaaggcaagagttagagaggcagcgacggctgctggggtctgtacagcaggatctggagaggagcttgcaggatgccagccgcggggacccagctcatgctggcttggctgagctgggccacagattggcccagaaactgcagggcctggagaactggggccaggaccctggggtctctgccaatgcctcaaaggcctggcaccagaagtcccacttccagaattctagggagtggagtggaaaggaaaagtggtgggatgggcagagagaccggaaggctgagcactggaaacataagaaggaagaatctggccgggaaaggaagaagaactggggaggtcaggaggacagggagccagcaggaaggtggaaggagggcaggccaagggtggaggagtcggggagcaagaaggagggcaagcgacagggcccgaaggaacccccaaggaaaagtggtagcttccactcctctggagaaaagcagaagcaacctcggtggagggaagggactaagggcagccatgaccccctgccatcctgggcagagctgttgaggcccaagtaccgggcaccccagggctgctcaggtgtggacgagtgtgcccggcaggagggcctgactttctttggcacagagctagccccagtgcggcaacaggagctggcctctctgctaagaacatacttggcacggctgccctgggctgggcagctgaccaaggagctacccctctcacctgctttctttggtgaggatggcatcttccgtcatgaccgcctccgcttccgggattttgtggatgccctggaggacagcttggaggaggtggctgtgcaacagacaggtgatgatgatgaagtagatgactttgaggacttcatcttcagccacttctttggagacaaagcactgaagaagaggtcagggaagaaggacaagcactcacagagcccaagagctgcggggcccagggaggggcacagccatagccaccaccaccaccaccggggctgacaccctgccccacagggaatggccttggcctggcccagcccaagatcccagcgttatctaactcctggagggtggactctgtcctggcttgtttggtgtcctcagatatctttcacacagtagagcaaaatcaccagccctgcactgatgtcactttatgtagaaaaaggccttagctggacctgcgttgccgtctatgcaaatgcatgcaaatactccaggccctgggatgtgggcttgtgttttgtcactgtgaagggggagatgggagaggagcctgttttggggtggggtctggggaaggcaatctgattctgaagctaaagagctttcatcctcttgagtgtatgtccccatagtgggccccttgacccacatgctgaccggtgccttgggatttgactagagttgctgcttccaaacctaacaaaaccccagggtaagtcctcgtgctgggcctcg

SEQ ID NO: 436 - protein, 535 aa, Homo sapiens
MCLLGALVLLGLGVLLFSGGLSESETGPMEEVERQVLPDPEVLEAVGDRQDGLREQLQAPVPPDSVPSLQNMGLLLDKLAKENQDIRLLQAQLQAQKEELQSLMHQPKGLEEENAQLRGALQQGEAFQRALESELQQLRARLQGLEADCVRGPDGVCLSGGRGPQGDKAIREQGPREQEPELSFLKQKEQLEAEAQALRQELERQRRLLGSVQQDLERSLQDASRGDPAHAGLAELGHRLAQKLQGLENWGQDPGVSANASKAWHQKSHFQNSREWSGKEKWWDGQRDRKAEHWKHKKEESGRERKKNWGGQEDREPAGRWKEGRPRVEESGSKKEGKRQGPKEPPRKSGSFHSSGEKQKQPRWREGTKGSHDPLPSWAELLRPKYRAPQGCSGVDECARQEGLTFFGTELAPVRQQELASLLRTYLARLPWAGQLTKELPLSPAFFGEDGIFRHDRLRFRDFVDALEDSLEEVAVQQTGDDDEVDDFEDFIFSHFFGDKALKKRSGKKDKHSQSPRAAGPREGHSHSHHHHHRG

SEQ ID NO: 437 - DNA, 1665 bp, Homo sapiens
  CDS (77)..(1387)
caacaagttaagctgaagaccgaagcaagagctggttcaggtggcagccacagcagcctcagggacctcagcaactatggcctcctgcccagactctgataatagctgggtgcttgctggctccgagagcctgccagtggagacactgggcccggcatccaggatggacccagaatctgagagagccctgcaggcccctcacagcccctccaagacagatgggaaagaattagctgggaccatggatggagaagggacgctcttccagactgaaagccctcagtctggcagcattctaacagaggagactgaggtcaagggcaccctggaaggtgatgtttgtggtgtggagcctcctggcccaggagacacagtagtccagggagacctgcaggagaccaccgtggtgacaggcctgggaccagacacacaggacctggaaggccagagccctccacagagcctgccttcaacccccaaagcagcttggatcagggaggagggccgctgctccagcagtgacgatgacaccgacgtggacatggagggtctgcggagacggcggggccgggaggccggcccacctcagcccatggtgcccctggctgtggagaaccaggctgggggtgagggtgcaggcggggagctgggcatctccctcaacatgtgcctccttggggccctgggtctgcttggcctgggggtcctcctcttctcaggtggcctctcagagtctgagactgggcccatggaggaagtggagcggcaggtcctcccagaccccgaggtgctggaagctgtgggggacaggcaggatgggctaagggaacagctgcaggccccagtgcctcctgacagtgtccccagcctgcaaaacatgggtcttctgctggacaagctggccaaggagaaccaggacatccggctgctgcaggcccagctgcaggcccaaaaggaagagcttcagagcctgatgcaccagcccaaagggctagaggaggagaatgcccagctccggggggctctgcagcagggcgaagccttccagcgggctctggagtcagagctgcagcagctgcgggcccggctccaggggctggaggccgactgtgtccggggcccagatggggatggcatcttccgtcatgaccgcctccgcttccgggattttgtggatgccctggaggacagcttggaggaggtggctgtgcaacagacaggtgatgatgatgaagtagatgactttgaggacttcatcttcagccacttctttggagacaaagcactgaagaagaggtcagggaagaaggacaagcactcacagagcccaagagctgcggggcccagggaggggcacagccatagccaccaccaccaccaccggggctgacaccctgccccacagggaatggccttggcctggcccagcccaagatcccagcgttatctaactcctggagggtggactctgtcctggcttgtttggtgtcctcagatatctttcacacagtagagcaaaatcaccagccctgcactgatgtcactttatgtagaaaaaggccttagctggacctgcgttgccgtctatgcaaatgcatgcaaatactccaggccctgggatgtgggcttgtgttttgtcactgtgaagggggagatgggagagga

SEQ ID NO: 438 - protein, 437 aa, Homo sapiens
MASCPDSDNSWVLAGSESLPVETLGPASRMDPESERALQAPHSPSKTDGKELAGTMDGEGTLFQTESPQSGSILTEETEVKGTLEGDVCGVEPPGPGDTVVQGDLQETTVVTGLGPDTQDLEGQSPPQSLPSTPKAAWIREEGRCSSSDDDTDVDMEGLRRRRGREAGPPQPMVPLAVENQAGGEGAGGELGISLNMCLLGALGLLGLGVLLFSGGLSESETGPMEEVERQVLPDPEVLEAVGDRQDGLREQLQAPVPPDSVPSLQNMGLLLDKLAKENQDIRLLQAQLQAQKEELQSLMHQPKGLEEENAQLRGALQQGEAFQRALESELQQLRARLQGLEADCVRGPDGDGIFRHDRLRFRDFVDALEDSLEEVAVQQTGDDDEVDDFEDFIFSHFFGDKALKKRSGKKDKHSQSPRAAGPREGHSHSHHHHHRG

SEQ ID NO: 439 - DNA, 2104 bp, Homo sapiens
  CDS (76)..(2103)
aacaagttaagctgaagaccgaagcaagagctggttcaggtggcagccacagcagcctcagggacctcagcaactatggcctcctgcccagactctgataatagctgggtgcttgctggctccgagagcctgccagtggagacactgggcccggcatccaggatggacccagaatctgagagagccctgcaggcccctcacagcccctccaagacagatgggaaagaattagctgggaccatggatggagaagggacgctcttccagactgaaagccctcagtctggcagcattctaacagaggagactgaggtcaagggcaccctggaaggtgatgtttgtggtgtggagcctcctggcccaggagacacagtagtccagggagacctgcaggagaccaccgtggtgacaggcctgggaccagacacacaggacctggaaggccagagccctccacagagcctgccttcaacccccaaagcagcttggatcagggaggagggccgctgctccagcagtgacgatgacaccgacgtggacatggagggtctgcggagacggcggggccgggaggccggcccacctcagcccatggtgcccctggctgtggagaaccaggctgggggtgagggtgcaggcggggagctgggcatctccctcaacatgtgcctccttggggccctgggtctgcttggcctgggggtcctcctcttctcaggtggcctctcagagtctgagactgggcccatggaggaagtggagcggcaggtcctcccagaccccgaggtgctggaagctgtgggggacaggcaggatgggctaagggaacagctgcaggccccagtgcctcctgacagtgtccccagcctgcaaaacatgggtcttctgctggacaagctggccaaggagaaccaggacatccggctgctgcaggcccagctgcaggcccaaaaggaagagcttcagagcctgatgcaccagcccaaagggctagaggaggagaatgcccagctccggggggctctgcagcagggcgaagccttccagcgggctctggagtcagagctgcagcagctgcgggcccggctccaggggctggaggccgactgtgtccggggcccagatggggtgtgcctcagtgggggtagaggcccacagggtgacaaggccatcagggagcaaggccccagggagcaggagccagaactcagcttcctgaagcagaaggaacagctggaggctgaggcacaggcattaaggcaagagttagagaggcagcgacggctgctggggtctgtacagcaggatctggagaggagcttgcaggatgccagccgcggggacccagctcatgctggcttggctgagctgggccacagattggcccagaaactgcagggcctggagaactggggccaggaccctggggtctctgccaatgcctcaaaggcctggcaccagaagtcccacttccagaattctagggagtggagtggaaaggaaaagtggtgggatgggcagagagaccggaaggctgagcactggaaacataagaaggaagaatctggccgggaaaggaagaagaactggggaggtcaggaggacagggagccagcaggaaggtggaaggagggcaggccaagggtggaggagtcggggagcaagaaggagggcaagcgacagggcccgaaggaacccccaaggaaaagtggtagcttccactcctctggagaaaagcagaagcaacctcggtggagggaagggactaagggcagccatgaccccctgccatcctgggcagagctgttgaggcccaagtaccgggcaccccagggctgctcaggtgtggacgagtgtgcccggcaggagggcctgactttctttggcacagagctagccccagtgcggcaacaggagctggcctctctgctaagaacatacttggcacggctgccctgggctgggcagctgaccaaggagctacccctctcacctgctttctttggtgaggatggcatcttccgtcatgaccgcctccgcttccgggattttgtggatgccctggaggacagcttggaggaggttctagaattcagcggccgct

SEQ ID NO: 440 - protein, 676 aa, Homo sapiens
MASCPDSDNSWVLAGSESLPVETLGPASRMDPESERALQAPHSPSKTDGKELAGTMDGEGTLFQTESPQSGSILTEETEVKGTLEGDVCGVEPPGPGDTVVQGDLQETTVVTGLGPDTQDLEGQSPPQSLPSTPKAAWIREEGRCSSSDDDTDVDMEGLRRRRGREAGPPQPMVPLAVENQAGGEGAGGELGISLNMCLLGALGLLGLGVLLFSGGLSESETGPMEEVERQVLPDPEVLEAVGDRQDGLREQLQAPVPPDSVPSLQNMGLLLDKLAKENQDIRLLQAQLQAQKEELQSLMHQPKGLEEENAQLRGALQQGEAFQRALESELQQLRARLQGLEADCVRGPDGVCLSGGRGPQGDKAIREQGPREQEPELSFLKQKEQLEAEAQALRQELERQRRLLGSVQQDLERSLQDASRGDPAHAGLAELGHRLAQKLQGLENWGQDPGVSANASKAWHQKSHFQNSREWSGKEKWWDGQRDRKAEHWKHKKEESGRERKKNWGGQEDREPAGRWKEGRPRVEESGSKKEGKRQGPKEPPRKSGSFHSSGEKQKQPRWREGTKGSHDPLPSWAELLRPKYRAPQGCSGVDECARQEGLTFFGTELAPVRQQELASLLRTYLARLPWAGQLTKELPLSPAFFGEDGIFRHDRLRFRDFVDALEDSLEEVLEFSGR

SEQ ID NO: 441 - DNA, 1539 bp, Homo sapiens
  CDS (1)..(1539)
gagtctgagactgggcccatggaggaagtggagcggcaggtcctcccagaccccgaggtgctggaagctgtgggggacaggcaggatgggctaagggaacagctgcaggccccagtgcctcctgacagtgtccccagcctgcaaaacatgggtcttctgctggacaagctggccaaggagaaccaggacatccggctgctgcaggcccagctgcaggcccaaaaggaagagcttcagagcctgatgcaccagcccaaagggctagaggaggagaatgcccagctccggggggctctgcagcagggcgaagccttccagcgggctctggagtcagagctgcagcagctgcgggcccggctccaggggctggaggccgactgtgtccggggcccagatggggtgtgcctcagtggggatagaggcccacagggtgacaaggccatcagggagcaaggccccagggagcaggagccagaactcagcttcctgaagcagaaggaacagctggaggctgaggcacaggcattaaggcaagagttagagaggcagcgacggctgctggggtctgtacagcaggatctggagaggagcttgcaggatgccagccgcggggacccagctcatgctggcttggctgagctgggccacagattggcccagaaactgcagggcctggagaactggggccaggaccctggggtctctgccaatgcctcaaaggcctggcaccagaagtcccacttccagaattctagggagtggagtggaaaggaaaagtggtgggatgggcagagagaccggaaggctgagcactggaaacataagaaggaagaatctggccgggaaaggaagaagaactggggaggtcaggaggacagggagccagcaggaaggtggaaggagggcaggccaagggtggaggagtcggggagcaagaaggagggcaagcgacagggcccgaaggaacccccaaggaaaagtggtagcttccactcctctggagaaaagcagaagcaacctcggtggagggaagggactaaggacagccatgaccccctgccatcctgggcagagctgttgaggcccaagtaccgggcaccccagggctgctcaggtgtggacgagtgtgcccggcaggagggcctgactttctttggcacagagctagccccagtgcggcaacaggagctggcctctctgctaagaacatacttggcacggctgccctgggctgggcagctgaccaaggagctacccctctcacctgctttctttggtgaggatggcatcttccgtcatgaccgcctccgcttccgggattttgtggatgccctggaggacagcttggaggaggtggctgtgcaacagacaggtgatgatgatgaagtagatgactttgaggacttcatcttcagccacttctttggagacaaagcactgaagaagaggtcagggaagaaggacaagcactcacagagcccaagagctgcggggcccagggaggggcacagccatagccaccaccaccaccaccggggc

SEQ ID NO: 442 - protein, 513 aa, Homo sapiens
ESETGPMEEVERQVLPDPEVLEAVGDRQDGLREQLQAPVPPDSVPSLQNMGLLLDKLAKENQDIRLLQAQLQAQKEELQSLMHQPKGLEEENAQLRGALQQGEAFQRALESELQQLRARLQGLEADCVRGPDGVCLSGDRGPQGDKAIREQGPREQEPELSFLKQKEQLEAEAQALRQELERQRRLLGSVQQDLERSLQDASRGDPAHAGLAELGHRLAQKLQGLENWGQDPGVSANASKAWHQKSHFQNSREWSGKEKWWDGQRDRKAEHWKHKKEESGRERKKNWGGQEDREPAGRWKEGRPRVEESGSKKEGKRQGPKEPPRKSGSFHSSGEKQKQPRWREGTKDSHDPLPSWAELLRPKYRAPQGCSGVDECARQEGLTFFGTELAPVRQQELASLLRTYLARLPWAGQLTKELPLSPAFFGEDGIFRHDRLRFRDFVDALEDSLEEVAVQQTGDDDEVDDFEDFIFSHFFGDKALKKRSGKKDKHSQSPRAAGPREGHSHSHHHHHRG

SEQ ID NO: 443 - DNA, 2366 bp, Homo sapiens
  CDS (76)..(2265)
gagaagttaagctgaagaccgaagcaagagctggttcaggtggcagccacagcagcctcagggacctcagcaactatggcctcctgcccagactctgataatagctgggtgcttgctggctccgagagcctgccagtggagacactgggcccggcatccaggatggacccagaatctgagagagccctgcaggcccctcacagcccctccaagacagatgggaaagaattagctgggaccatggatggagaagggacgctcttccagactgaaagccctcagtctggcagcattctaacagaggagactgaggtcaagggcaccctggaaggtgatgtttgtggtgtggagcctcctggcccaggagacacagtagtccagggagacctgcaggagaccaccgtggtgacaggcctgggaccagacacacaggacctggaaggccagagccctccacagagcctgccttcaacccccaaagcagcttggatcagggaggagggccgctgctccagcagtgacgatgacaccgacgtggacatggagggtctgcggagacggcggggccgggaggccggcccacctcagcccatggtgcccctggctgtggagaaccaggctgggggtgagggtgcaggcggggagctgggcatctccctcaacatgtgcctccttggggccctggttctgcttggcctgggggtcctcctcttctcaggtggcctctcagagtctgagactgggcccatggaggaagtggagcggcaggtcctcccagaccccgaggtgctggaagctgtgggggacaggcaggatgggctaagggaacagctgcaggccccagtgcctcctgacagtgtccccagcctgcaaaacatgggtcttctgctggacaagctggccaaggagaaccaggacatccggctgctgcaggcccagctgcaggcccaaaaggaagagcttcagagcctgatgcaccagcccaaagggctagaggaggagaatgcccagctccggggggctctgcagcagggcgaagccttccagcgggctctggagtcagagctgcagcagctgcgggcccggctccaggggctggaggccgactgtgtccggggcccagatggggtgtgcctcagtggggatagaggcccacagggtgacaaggccatcagggagcaaggccccagggagcaggagccagaactcagcttcctgaatcagaaggaacagctggaggctgaggcacaggcattaaggcaagagttagagaggcagcgacggctgctggggtctgtacagcaggatctggagaggagcttgcaggatgccagccgcggggacccagctcatgctggcttggctgagctgggccacagattggcccagaaactgcagggcctggagaactggggccaggaccctggggtctctgccaatgcctcaaaggcctggcaccagaagtcccacttccagaattctagggagtggagtggaaaggaaaagtggtgggatgggcagagagaccggaaggctgagcactggaaacataagaaggaagaatctggccgggaaaggaagaagaactggggaggtcaggaggacagggagccagcaggaaggtggaaggagggcaggccaagggtggaggagtcggggagcaagaaggagggcaagcgacaggccccgaaggaacccccaaggaaaagtggtagcttccactcctctggagaaaagcagaagcaacctcggtggagggaagggactaaggacagccatgaccccctgccatcctgggcagagctgttgaggcccaagtaccgggcaccccagggctgctcaggtgtggacgagtgtgcccggcaggagggcctgactttctttggcacagagctagccccagtgcggcaacaggagctggcctctctgctaagaacatacttggcacggctgccctgggctgggcagctgaccaaggagctacccctctcacctgctttctttggtgaggatggcatcttccgtcatgaccgcctccgcttccgggattttgtggatgccctggaggacagcttggaggaggtggctgtgcaacagacaggtgatgatgatgaagtagatgactttgaggacttcatcttcagccacttctttggagacaaagcactgaagaagaggtcagggaagaaggacaagcactcacagagcccaagagctgcggggcccagggaggggcacagccatagccaccaccaccaccggggctgacaccctgccccacagggaatggccttggcctggcccagcccaagatcccagcgttatctaactcctggagggtggactctgtcctggcttgtttggtg

SEQ ID NO: 444 - protein, 730 aa, Homo sapiens
MASCPDSDNSWVLAGSESLPVETLGPASRMDPESERALQAPHSPSKTDGKELAGTMDGEGTLFQTESPQSGSILTEETEVKGTLEGDVCGVEPPGPGDTVVQGDLQETTVVTGLGPDTQDLEGQSPPQSLPSTPKAAWIREEGRCSSSDDDTDVDMEGLRRRRGREAGPPQPMVPLAVENQAGGEGAGGELGISLNMCLLGALVLLGLGVLLFSGGLSESETGPMEEVERQVLPDPEVLEAVGDRQDGLREQLQAPVPPDSVPSLQNMGLLLDKLAKENQDIRLLQAQLQAQKEELQSLMHQPKGLEEENAQLRGALQQGEAFQRALESELQQLRARLQGLEADCVRGPDGVCLSGDRGPQGDKAIREQGPREQEPELSFLNQKEQLEAEAQALRQELERQRRLLGSVQQDLERSLQDASRGDPAHAGLAELGHRLAQKLQGLENWGQDPGVSANASKAWHQKSHFQNSREWSGKEKWWDGQRDRKAEHWKHKKEESGRERKKNWGGQEDREPAGRWKEGRPRVEESGSKKEGKRQAPKEPPRKSGSFHSSGEKQKQPRWREGTKDSHDPLPSWAELLRPKYRAPQGCSGVDECARQEGLTFFGTELAPVRQQELASLLRTYLARLPWAGQLTKELPLSPAFFGEDGIFRHDRLRFRDFVDALEDSLEEVAVQQTGDDDEVDDFEDFIFSHFFGDKALKKRSGKKDKHSQSPRAAGPREGHSHSHHHHRG

SEQ ID NO: 445 - DNA, 2403 bp, Homo sapiens
  CDS (81)..(2291)
ggcacgagaagttaagctgaagaccgaagcaagagctggttcaggtggcagccacagcagcctcagggacctcagcaactatggcctcctgcccagactctgataatagctgggtgcttgctggctccgagagcctgccagtggagacactgggcccggcatccaggatggacccagaatctgagagagccctgcaggcccctcacagcccctccaagacagatgggaaagaattagctgggaccatggatggagaagggacgctcttccagactgaaagccctcagtctggcagcattctaacagaggagactgaggtcaagggcaccctggaaggtgatgtttgtggtgtggagcctcctggcccaggaggcacagtagtccagggagacctgcaggagaccaccgtggtgacaggcctgggaccagacacacaggacctggaaggccagagccctccacagagcctgccttcaacccccaaagcagcttggatcagggaggagggccgctgctccagcagtgacgatgacaccgacgtggacatggagggtctgcggagacggcggggccgggaggccggcccacctcagcccatggtgcccctggctgtggagaaccaggctgggggtgagggtgcaggcggggagctgggcatctccctcaacatgtgcctccttggggccctggttctgcttggcctgggggtcctcctcttctcaggtggcctctcagagtctgagactgggcccatggaggaagtggagcggcaggtcctcccagaccccgaggtgctggaagctgtgggggacaggcaggatgggctaagggaacagctgcaggccccagtgcctcctgacagtgtccccagcctgcaaaacatgggtcttctgctggacaagctggccaaggagaaccaggacatccggctgctgcaggcccagctgcaggcccaaaaggaagagcttcagagcctgatgcaccagcccaaagggctagaggaggagaatgcccagctccggggggctctgcagcagggcgaagccttccagcgggctctggagtcagagctgcagcagctgcgggcccggctccaggggctggaggccgactgtgtccggggcccagatggggtgtgcctcagtggggatagaggcccacagggtgacaaggccatcagggagcaaggccccagggagcaggagccagaactcagcttcctgaagcagaaggaacagctggaggctgaggcacaggcattaaggcaagagttagagaggcagcgacggctgctggggtctgtacagcaggatctggagaggagcttgcaggatgccagccgcggggacccagctcatgctggcttggctgagctgggccacagattggcccagaaactgcagggcctggagaactggggccaggaccctggggtctctgccaatgcctcaaaggcctggcaccagaagtcccacttccagaattctagggagtggagtggaaaggaaaagtggtgggatgggcagagagaccggaaggctgagcactggaaacataagaaggaagaatctggccgggaaaggaagaagaactggggaggtcaggaggacagggagccagcaggaaggtggaaggagggcaggccaagggtggaggagtcggggagcaagaaggagggcaagcgacagggcccgaaggaacccccaaggaaaagtggtagcttccactcctctggagaaaagcagaagcaacctcggtggagggaagggactaaggacagccatgaccccctgccatcctgggcagagctgttgaggcccaagtaccgggcaccccagggctgctcaggtgtggacgagtgtgcccggcaggagggcttgactttctttggcacagagctagccccagtgcggcaacaggagctggcctctctgctaagaacatacttggcacggctgccctgggctgggcagctgaccaaggagctacccctctcacctgctttctttggtgaggatggcatcttccgtcatgaccgcctccgcttccgggattttgtggatgccctggaggacagcttggaggaggtggctgtgcaacagacaggtgatgatgatgaagtagatgactttgaggacttcatcttcagccacttctttggagacaaagcactgaagaagaggcctcttcctccccacaggtcagggaagaaggacaagcactcacagagcccaagagctgcggggcccagggaggggcacagccatagccaccaccaccaccaccggggctgacaccctgccccacagggaatggccttggcctggcccagcccaagatcccagcgttatccaactcctggagggtggactctgtcctggcttgtttggtgtcctcagatat

SEQ ID NO: 446 - protein, 737 aa, Homo sapiens
MASCPDSDNSWVLAGSESLPVETLGPASRMDPESERALQAPHSPSKTDGKELAGTMDGEGTLFQTESPQSGSILTEETEVKGTLEGDVCGVEPPGPGGTVVQGDLQETTVVTGLGPDTQDLEGQSPPQSLPSTPKAAWIREEGRCSSSDDDTDVDMEGLRRRRGREAGPPQPMVPLAVENQAGGEGAGGELGISLNMCLLGALVLLGLGVLLFSGGLSESETGPMEEVERQVLPDPEVLEAVGDRQDGLREQLQAPVPPDSVPSLQNMGLLLDKLAKENQDIRLLQAQLQAQKEELQSLMHQPKGLEEENAQLRGALQQGEAFQRALESELQQLRARLQGLEADCVRGPDGVCLSGDRGPQGDKAIREQGPREQEPELSFLKQKEQLEAEAQALRQELERQRRLLGSVQQDLERSLQDASRGDPAHAGLAELGHRLAQKLQGLENWGQDPGVSANASKAWHQKSHFQNSREWSGKEKWWDGQRDRKAEHWKHKKEESGRERKKNWGGQEDREPAGRWKEGRPRVEESGSKKEGKRQGPKEPPRKSGSFHSSGEKQKQPRWREGTKDSHDPLPSWAELLRPKYRAPQGCSGVDECARQEGLTFFGTELAPVRQQELASLLRTYLARLPWAGQLTKELPLSPAFFGEDGIFRHDRLRFRDFVDALEDSLEEVAVQQTGDDDEVDDFEDFIFSHFFGDKALKKRPLPPHRSGKKDKHSQSPRAAGPREGHSHSHHHHHRG

SEQ ID NO: 447 - DNA, 2403 bp, Homo sapiens
  CDS (81)..(2291)
ggcacgagaagttaagctgaagaccgaagcaagagctggttcaggtggcagccacagcagcctcagggacctcagcaactatggcctcctgcccagactctgataatagctgggtgcttgctggctccgagagcctgccagtggagacactgggcccggcatccaggatggacccagaatctgagagagccctgcaggcccctcacagcccctccaagacagatgggaaagaattagctgggaccatggatggagaagggacgctcttccagactgaaagccctcagtctggcagcattctaacagaggagactgaggtcaagggcaccctggaaggtgatgtttgtggtgtggagcctcctggcccaggagacacagtagtccagggagacctgcaggagaccaccgtggtgacaggcctgggaccagacacacaggacctggaaggccagagccctccacagagcctgccttcaacccccaaagcagcttggatcagggaggagggccgctgctccagcagtgacgatgacaccgacgtggacatggagggtctgcggagacggcggggccgggaggccggcccacctcagcccatggtgcccctggctgtggagaaccaggctgggggtgagggtgcaggcggggagctgggcatctccctcaacatgtgcctccttggggccctggttctgcttggcctgggggtcctcctcttctcaggtggcctctcagagtctgagactgggcccatggaggaagtggagcggcaggtcctcccagaccccgaggtgctggaagctgtgggggacaggcaggatgggctaagggaacagctgcaggccccagtgcctcctgacagtgtccccagcctgcaaaacatgggtcttctgctggacaagctggccaaggagaaccaggacatccggctgctgcaggcccagctgcaggcccaaaaggaagagcttcagagcctgatgcaccagcccaaagggctagaggaggagaatgcccagctccggggggctctgcagcagggcgaagccttccagcgggctctggagtcagagctgcagcagctgcgggcccggctccaggggctggaggccgactgtgtccggggcccagatggggtgtgcctcagtgggggtagaggcccacagggtgacaaggccatcagggagcaaggccccagggagcaggagccagaactcagcttcctgaagcagaaggaacagctggaggctgaggcacaggcattaaggcaagagttagagaggcagcgacggctgctggggtctgtacagcaggatctggagaggagcttgcaggatgccagccgcggggacccagctcatgctggcttggctgagctgggccacagattggcccagaaactgcagggcctggagaactggggccaggaccctggggtctctgccaatgcctcaaaggcctggcaccagaagtcccacttccagaattctagggagtggagtggaaaggaaaagtggtgggatgggcagagagaccggaaggctgagcactggaaacataagaaggaagaatctggccgggaaaggaagaagaactggggaggtcaggaggacagggagccagcaggaaggtggaaggagggcaggccaagggtggaggagtcggggagcaagaaggagggcaagcgacagggcccgaaggaacccccaaggaaaagtggtagcttccactcctctggagaaaagcagaagcaacctcggtggagggaagggactaaggacagccatgaccccctgccatcctgggcagagctgttgaggcccaagtaccgggcaccccagggctgctcaggtgtggacgagtgtgcccggcaggagggcttgactttctttggcacagagctagccccagtgcggcaacaggagctggcctctctgctaagaacatacttggcacggctgccctgggctgggcagctgaccaaggagctacccctctcacctgctttctttggtgaggatggcatcttccgtcatgaccgcctccgcttccgggattttgtggatgccctggaggacagcttggaggaggtggctgtgcaacagacaggtgatgatgatgaagtagatgactttgaggacttcatcttcagccacttctttggagacaaagcactgaagaagaggcctcttcctccccacaggtcagggaagaaggacaagcactcacagagcccaagagctgcggggcccagggaggggcacagccatagccaccaccaccaccaccggggctgacaccctgccccacagggaatggccttggcctggcccagcccaagatcccagcgttatccaactcctggagggtggactctgtcctggcttgtttggtgtcctcagatat

SEQ ID NO: 448 - protein, 737 aa, Homo sapiens
MASCPDSDNSWVLAGSESLPVETLGPASRMDPESERALQAPHSPSKTDGKELAGTMDGEGTLFQTESPQSGSILTEETEVKGTLEGDVCGVEPPGPGDTVVQGDLQETTVVTGLGPDTQDLEGQSPPQSLPSTPKAAWIREEGRCSSSDDDTDVDMEGLRRRRGREAGPPQPMVPLAVENQAGGEGAGGELGISLNMCLLGALVLLGLGVLLFSGGLSESETGPMEEVERQVLPDPEVLEAVGDRQDGLREQLQAPVPPDSVPSLQNMGLLLDKLAKENQDIRLLQAQLQAQKEELQSLMHQPKGLEEENAQLRGALQQGEAFQRALESELQQLRARLQGLEADCVRGPDGVCLSGGRGPQGDKAIREQGPREQEPELSFLKQKEQLEAEAQALRQELERQRRLLGSVQQDLERSLQDASRGDPAHAGLAELGHRLAQKLQGLENWGQDPGVSANASKAWHQKSHFQNSREWSGKEKWWDGQRDRKAEHWKHKKEESGRERKKNWGGQEDREPAGRWKEGRPRVEESGSKKEGKRQGPKEPPRKSGSFHSSGEKQKQPRWREGTKDSHDPLPSWAELLRPKYRAPQGCSGVDECARQEGLTFFGTELAPVRQQELASLLRTYLARLPWAGQLTKELPLSPAFFGEDGIFRHDRLRFRDFVDALEDSLEEVAVQQTGDDDEVDDFEDFIFSHFFGDKALKKRPLPPHRSGKKDKHSQSPRAAGPREGHSHSHHHHHRG

SEQ ID NO: 449 - DNA, 2403 bp, Homo sapiens
  CDS (81)..(2291)
ggcacgagaagttaagctgaagaccgaagcaagagctggttcaggtggcagccacagcagcctcagggacctcagcaactatggcctcctgcccagactctgataatagctgggtgcttgctggctccgagagcctgccagtggagacactgggcccggcatccaggatggacccagaatctgagagagccctgcaggcccctcacagcccctccaagacagatgggaaagaattagctgggaccatggatggagaagggacgctcttccagactgaaagccctcagtctggcagcattctaacagaggagactgaggtcaagggcaccctggaaggtgatgtttgtggtgtggagcctcctggcccaggagacacagtagtccagggagacctgcaggagaccaccgtggtgacaggcctgggaccagacacacaggacctggaaggccagagccctccacagagcctgccttcaacccccaaagcagcttggatcagggaggagggccgctgctccagcagtgacgatgacaccgacgtggacatggagggtctgcggagacggcggggccgggaggccggcccacctcagcccatggtgcccctggctgtggagaaccaggctgggggtgagggtgcaggcggggagctgggcatctccctcaacatgtgcctccttggggccctggttctgcttggcctgggggtcctcctcttctcaggtggcctctcagagtctgagactgggcccatggaggaagtggagcggcaggtcctcccagaccccgaggtgctggaagctgtgggggacaggcaggatgggctaagggaacagctgcaggccccagtgcctcctgacagtgtccccagcctgcaaaacatgggtcttctgctggacaagctggccaaggagaaccaggacatccggctgctgcaggcccagctgcaggcccaaaaggaagagcttcagagcctgatgcaccagcccaaagggctagaggaggagaatgcccagctccggggggctctgcagcagggcgaagccttccagcgggctctggagtcagagctgcagcagctgcgggcccggctccaggggctggaggccgactgtgtccggggcccagatggggtgtgcctcagtggggatagaggcccacagggtgacaaggccatcagggagcaaggccccagggagcaggagccagaactcagcttcctgaagcagaaggaacagctggaggctgaggcacaggcattaaggcaagagttagagaggcagcgacggctgctggggtctgtacagcaggatctggagaggagcttgcaggatgccagccgcggggacccagctcatgctggcttggctgagctgggccacagattggcccagaaactgcagggcctggagaactggggccaggaccctggggtctctgccaatgcctcaaaggcctggcaccagaagtcccacttccagaattctagggagtggagtggaaaggaaaagtggtgggatgggcagagagaccggaaggctgagcactggaaacataagaaggaagaatctggccgggaaaggaagaagaactggggaggtcaggaggacagggagccagcaggaaggtggaaggagggcaggccaagggtggaggagtcggggagcaagaaggagggcaagcgacagggcccgaaggaacccccaaggaaaagtggtagcttccactcctctggagaaaagcagaagcaacctcggtggagggaagggactaaggacagccatgaccccctgccatcctgggcagagctgttgaggcccaagtaccgggcaccccagggctgctcaggtgtggacgagtgtgcccggcaggagggcttgactttctttggcacagagctagtcccagtgcggcaacaggagctggcctctctgctaagaacatacttggcacggctgccctgggctgggcagctgaccaaggagctacccctctcacctgctttctttggtgaggatggcatcttccgtcatgaccgcctccgcttccgggattttgtggatgccctggaggacagcttggaggaggtggctgtgcaacagacaggtgatgatgatgaagtagatgactttgaggacttcatcttcagccacttctttggagacaaagcactgaagaagaggcctcttcctccccacaggtcagggaagaaggacaagcactcacagagcccaagagctgcggggcccagggaggggcacagccatagccaccaccaccaccaccggggctgacaccctgccccacagggaatggccttggcctggcccagcccaagatcccagcgttatccaactcctggagggtggactctgtcctggcttgtttggtgtcctcagatat

SEQ ID NO: 450 - protein, 737 aa, Homo sapiens
MASCPDSDNSWVLAGSESLPVETLGPASRMDPESERALQAPHSPSKTDGKELAGTMDGEGTLFQTESPQSGSILTEETEVKGTLEGDVCGVEPPGPGDTVVQGDLQETTVVTGLGPDTQDLEGQSPPQSLPSTPKAAWIREEGRCSSSDDDTDVDMEGLRRRRGREAGPPQPMVPLAVENQAGGEGAGGELGISLNMCLLGALVLLGLGVLLFSGGLSESETGPMEEVERQVLPDPEVLEAVGDRQDGLREQLQAPVPPDSVPSLQNMGLLLDKLAKENQDIRLLQAQLQAQKEELQSLMHQPKGLEEENAQLRGALQQGEAFQRALESELQQLRARLQGLEADCVRGPDGVCLSGDRGPQGDKAIREQGPREQEPELSFLKQKEQLEAEAQALRQELERQRRLLGSVQQDLERSLQDASRGDPAHAGLAELGHRLAQKLQGLENWGQDPGVSANASKAWHQKSHFQNSREWSGKEKWWDGQRDRKAEHWKHKKEESGRERKKNWGGQEDREPAGRWKEGRPRVEESGSKKEGKRQGPKEPPRKSGSFHSSGEKQKQPRWREGTKDSHDPLPSWAELLRPKYRAPQGCSGVDECARQEGLTFFGTELVPVRQQELASLLRTYLARLPWAGQLTKELPLSPAFFGEDGIFRHDRLRFRDFVDALEDSLEEVAVQQTGDDDEVDDFEDFIFSHFFGDKALKKRPLPPHRSGKKDKHSQSPRAAGPREGHSHSHHHHHRG

SEQ ID NO: 451 - DNA, 2403 bp, Homo sapiens
  CDS (81)..(2291)
ggcacgagaagttaagctgaagaccgaagcaagagctggttcaggtggcagccacagcagcctcagggacctcagcaactatggcctcctgcccagactctgataatagctgggtgcttgctggctccgagagcctgccagtggagacactgggcccggcatccaggatggacccagaatctgagagagccctgcaggcccctcacagcccctccaagacagatgggaaagaattagctgggaccatggatggagaagggacgctcttccagactgaaagccctcagtctggcagcattctaacagaggagactgaggtcaagggcaccctggaaggtgatgtttgtggtgtggagcctcctggcccaggagacacagtagtccagggagacctgcaggagaccaccgtggtgacaggcctgggaccagacacacaggacctggaaggccagagccctccacagagcctgccttcaacccccaaagcagcttggatcagggaggagggccgctgctccagcagtgacgatgacaccgacgtggacatggagggtctgcggagacggcggggccgggaggccggcccacctcagcccatggtgcccctggctgtggagaaccaggctgggggtgagggtgcaggcggggagctgggcatctccctcaacatgtgcctccttggggccctggttctgcttggcctgggggtcctcctcttctcaggtggcctctcagagtctgagactgggcccatggaggaagtggagcggcaggtcctcccagaccccgaggtgctggaagctgtgggggacaggcaggatgggctaagggaacagctgcaggccccagtgcctcctgacagtgtccccagcctgcaaaacatgggtcttctgctggacaagctggccaaggagaaccaggacatccggctgctgcaggcccagctgcaggcccaaaaggaagagcttcagagcctgatgcaccagcccaaagggctagaggaggagaatgcccagctccggggggctctgcagcagggcgaagccttccagcgggctctggagtcagagctgcagcagctgcgggcccggctccaggggctggaggccgactgtgtccggggcccagatggggtgtgcctcagtggggatagaggcccacagggtgacaaggccatcagggagcaaggccccagggagcaggagccagaactcagcttcctgaagcagaaggaacagctggaggctgaggcacaggcattaaggcaagagttagagaggcagcgacggctgctggggtctgtacagcaggatctggagaggagcttgcaggatgccagccgcggggacccagctcatgctggcttggctgagctgggccacagattggcccagaaactgcagggcctggagaactggggccaggaccctggggtctctgccaatgcctcaaaggcctggcaccagaagtcccacttccagaattctagggagtggagtggaaaggaaaagtggtgggatgggcagagagaccggaaggctgagcactggaaacataagaaggaagaatctggccgggaaaggaagaagaactggggaggtcaggaggacagggagccagcaggaaggtggaaggagggcaggccaagggtggaggagtcggggagcaagaaggagggcaagcgacagggcccgaaggaacccccaaggaaaagtggtagcttccactcctctggagaaaagcagaagcaacctcggtggagggaagggactaaggacagccatgaccccctgccatcctgggcagagctgttgaggcccaagtaccgggcaccccagggctgctcaggtgtggacgagtgtgcccggcaggagggcttgactttctttggcacagagctagccccagtgcggcaacgggagctggcctctctgctaagaacatacttggcacggctgccctgggctgggcagctgaccaaggagctacccctctcacctgctttctttggtgaggatggcatcttccgtcatgaccgcctccgcttccgggattttgtggatgccctggaggacagcttggaggaggtggctgtgcaacagacaggtgatgatgatgaagtagatgactttgaggacttcatcttcagccacttctttggagacaaagcactgaagaagaggcctcttcctccccacaggtcagggaagaaggacaagcactcacagagcccaagagctgcggggcccagggaggggcacagccatagccaccaccaccaccaccggggctgacaccctgccccacagggaatggccttggcctggcccagcccaagatcccagcgttatccaactcctggagggtggactctgtcctggcttgtttggtgtcctcagatat

SEQ ID NO: 452 - protein, 737 aa, Homo sapiens
MASCPDSDNSWVLAGSESLPVETLGPASRMDPESERALQAPHSPSKTDGKELAGTMDGEGTLFQTESPQSGSILTEETEVKGTLEGDVCGVEPPGPGDTVVQGDLQETTVVTGLGPDTQDLEGQSPPQSLPSTPKAAWIREEGRCSSSDDDTDVDMEGLRRRRGREAGPPQPMVPLAVENQAGGEGAGGELGISLNMCLLGALVLLGLGVLLFSGGLSESETGPMEEVERQVLPDPEVLEAVGDRQDGLREQLQAPVPPDSVPSLQNMGLLLDKLAKENQDIRLLQAQLQAQKEELQSLMHQPKGLEEENAQLRGALQQGEAFQRALESELQQLRARLQGLEADCVRGPDGVCLSGDRGPQGDKAIREQGPREQEPELSFLKQKEQLEAEAQALRQELERQRRLLGSVQQDLERSLQDASRGDPAHAGLAELGHRLAQKLQGLENWGQDPGVSANASKAWHQKSHFQNSREWSGKEKWWDGQRDRKAEHWKHKKEESGRERKKNWGGQEDREPAGRWKEGRPRVEESGSKKEGKRQGPKEPPRKSGSFHSSGEKQKQPRWREGTKDSHDPLPSWAELLRPKYRAPQGCSGVDECARQEGLTFFGTELAPVRQRELASLLRTYLARLPWAGQLTKELPLSPAFFGEDGIFRHDRLRFRDFVDALEDSLEEVAVQQTGDDDEVDDFEDFIFSHFFGDKALKKRPLPPHRSGKKDKHSQSPRAAGPREGHSHSHHHHHRG

SEQ ID NO: 453 - DNA, 2403 bp, Homo sapiens
  CDS (81)..(2291)
ggcacgagaagttaagctgaagaccgaagcaagagctggttcaggtggcagccacagcagcctcagggacctcagcaactatggcctcctgcccagactctgataatagctgggtgcttgctggctccgagagcctgccagtggagacactgggcccggcatccaggatggacccagaatctgagagagccctgcaggcccctcacagcccctccaagacagatgggaaagaattagctgggaccatggatggagaagggacgctcttccagactgaaagccctcagtctggcagcattctaacagaggagactgaggtcaagggcaccctggaaggtgatgtttgtggtgtggagcctcctggcccaggagacacagtagtccagggagacctgcaggagaccaccgtggtgacaggcctgggaccagacacacaggacctggaaggccagagccctccacagagcctgccttcaacccccaaagcagcttggatcagggaggagggccgctgctccagcagtgacgatgacaccgacgtggacatggagggtctgcggagacggcggggccgggaggccggcccacctcagcccatggtgcccctggctgtggagaaccaggctgggggtgagggtgcaggcggggagctgggcatctccctcaacatgtgcctccttggggccctggttctgcttggcctgggggtcctcctcttctcaggtggcctctcagagtctgagactgggcccatggaggaagtggagcggcaggtcctcccagaccccgaggtgctggaagctgtgggggacaggcaggatgggctaagggaacagctgcaggccccagtgcctcctgacagtgtccccagcctgcaaaacatgggtcttctgctggacaagctggccaaggagaaccaggacatccggctgctgcaggcccagctgcaggcccaaaaggaagagcttcagagcctgatgcaccagcccaaagggctagaggaggagaatgcccagctccggggggctctgcagcagggcgaagccttccagcgggctctggagtcagagctgcagcagctgcgggcccggctccaggggctggaggccgactgtgtccggggcccagatggggtgtgcctcagtggggatagaggcccacagggtgacaaggccatcagggagcaaggccccagggagcaggagccagaactcagcttcctgaagcagaaggaacagctggaggctgaggcacaggcattaaggcaagagttagagaggcagcgacggctgctggggtctgtacagcaggatctggagaggagcttgcaggatgccagccgcggggacccagctcatgctggcttggctgagctgggccacagattggcccagaaactgcagggcctggagaactggggccaggaccctggggtctctgccaatgcctcaaaggcctggcaccagaagtcccacttccagaattctagggagtggagtggaaaggaaaagtggtgggatgggcagagagaccggaaggctgagcactggaaacataagaaggaagaatctggccgggaaaggaagaagaactggggaggtcaggaggacagggagccagcaggaaggtggaaggagggcaggccaagggtggaggagtcggggagcaagaaggagggcaagcgacagggcccgaaggaacccccaaggaaaagtggtagcttccactcctctggagaaaagcagaagcaacctcggtggagggaagggactaaggacagccatgaccccctgccatcctgggcagagctgttgaggcccaagtaccgggcaccccagggctgctcaggtgtggacgagtgtgcccggcaggagggcttgactttctttggcacagagctagccccagtgcggcaacaggagctggcctctctgctaagaacatacttggtacggctgccctgggctgggcagctgaccaaggagctacccctctcacctgctttctttggtgaggatggcatcttccgtcatgaccgcctccgcttccgggattttgtggatgccctggaggacagcttggaggaggtggctgtgcaacagacaggtgatgatgatgaagtagatgactttgaggacttcatcttcagccacttctttggagacaaagcactgaagaagaggcctcttcctccccacaggtcagggaagaaggacaagcactcacagagcccaagagctgcggggcccagggaggggcacagccatagccaccaccaccaccaccggggctgacaccctgccccacagggaatggccttggcctggcccagcccaagatcccagcgttatccaactcctggagggtggactctgtcctggcttgtttggtgtcctcagatat

SEQ ID NO: 454 - protein, 737 aa, Homo sapiens
MASCPDSDNSWVLAGSESLPVETLGPASRMDPESERALQAPHSPSKTDGKELAGTMDGEGTLFQTESPQSGSILTEETEVKGTLEGDVCGVEPPGPGDTVVQGDLQETTVVTGLGPDTQDLEGQSPPQSLPSTPKAAWIREEGRCSSSDDDTDVDMEGLRRRRGREAGPPQPMVPLAVENQAGGEGAGGELGISLNMCLLGALVLLGLGVLLFSGGLSESETGPMEEVERQVLPDPEVLEAVGDRQDGLREQLQAPVPPDSVPSLQNMGLLLDKLAKENQDIRLLQAQLQAQKEELQSLMHQPKGLEEENAQLRGALQQGEAFQRALESELQQLRARLQGLEADCVRGPDGVCLSGDRGPQGDKAIREQGPREQEPELSFLKQKEQLEAEAQALRQELERQRRLLGSVQQDLERSLQDASRGDPAHAGLAELGHRLAQKLQGLENWGQDPGVSANASKAWHQKSHFQNSREWSGKEKWWDGQRDRKAEHWKHKKEESGRERKKNWGGQEDREPAGRWKEGRPRVEESGSKKEGKRQGPKEPPRKSGSFHSSGEKQKQPRWREGTKDSHDPLPSWAELLRPKYRAPQGCSGVDECARQEGLTFFGTELAPVRQQELASLLRTYLVRLPWAGQLTKELPLSPAFFGEDGIFRHDRLRFRDFVDALEDSLEEVAVQQTGDDDEVDDFEDFIFSHFFGDKALKKRPLPPHRSGKKDKHSQSPRAAGPREGHSHSHHHHHRG

SEQ ID NO: 455 - DNA, 2403 bp, Homo sapiens
  CDS (81)..(2291)
ggcacgagaagttaagctgaagaccgaagcaagagctggttcaggtggcagccacagcagcctcagggacctcagcaactatggcctcctgcccagactctgataatagctgggtgcttgctggctccgagagcctgccagtggagacactgggcccggcatccaggatggacccagaatctgagagagccctgcaggcccctcacagcccctccaagacagatgggaaagaattagctgggaccatggatggagaagggacgctcttccagactgaaagccctcagtctggcagcattctaacagaggagactgaggtcaagggcaccctggaaggtgatgtttgtggtgtggagcctcctggcccaggagacacagtagtccagggagacctgcaggagaccaccgtggtgacaggcctgggaccagacacacaggacctggaaggccagagccctccacagagcctgccttcaacccccaaagcagcttggatcagggaggagggccgctgctccagcagtgacgatgacaccgacgtggacatggagggtctgcggagacggcggggccgggaggccggcccacctcagcccatggtgcccctggctgtggagaaccaggctgggggtgagggtgcaggcggggagctgggcatctccctcaacatgtgcctccttggggccctggttctgcttggcctgggggtcctcctcttctcaggtggcctctcagagtctgagactgggcccatggaggaagtggagcggcaggtcctcccagaccccgaggtgctggaagctgtgggggacaggcaggatgggctaagggaacagctgcaggccccagtgcctcctgacagtgtccccagcctgcaaaacatgggtcttctgctggacaagctggccaaggagaaccaggacatccggctgctgcaggcccagctgcaggcccaaaaggaagagcttcagagcctgatgcaccagcccaaagggctagaggaggagaatgcccagctccggggggctctgcagcagggcgaagccttccagcgggctctggagtcagagctgcagcagctgcgggcccggctccaggggctggaggccgactgtgtccggggcccagatggggtgtgcctcagtggggatagaggcccacagggtgacaaggccatcagggagcaaggccccagggagcaggagccagaactcagcttcctgaagcagaaggaacagctggaggctgaggcacaggcattaaggcaagagttagagaggcagcgacggctgctggggtctgtacagcaggatctggagaggagcttgcaggatgccagccgcggggacccagctcatgctggcttggctgagctgggccacagattggcccagaaactgcagggcctggagaactggggccaggaccctggggtctctgccaatgcctcaaaggcctggcaccagaagtcccacttccagaattctagggagtggagtggaaaggaaaagtggtgggatgggcagagagaccggaaggctgagcactggaaacataagaaggaagaatctggccgggaaaggaagaagaactggggaggtcaggaggacagggagccagcaggaaggtggaaggagggcaggccaagggtggaggagtcggggagcaagaaggagggcaagcgacagggcccgaaggaacccccaaggaaaagtggtagcttccactcctctggagaaaagcagaagcaacctcggtggagggaagggactaaggacagccatgaccccctgccatcctgggcagagctgttgaggcccaagtaccgggcaccccagggctgctcaggtgtggacgagtgtgcccggcaggagggcttgactttctttggcacagagctagccccagtgcggcaacaggagctggcctctctgctaagaacatacttggcacggctgccctgggctgggcagctgaccaaggagctacccctctcacctgctttctttggtgaggatggcatcttccgtcatgaccgcctccgcttccgggattttgtggatgccctggaggacagcttggaggaggtggctgtgcaacagacaggtgatgatgatgaagtatatgactttgaggacttcatcttcagccacttctttggagacaaagcactgaagaagaggcctcttcctccccacaggtcagggaagaaggacaagcactcacagagcccaagagctgcggggcccagggaggggcacagccatagccaccaccaccaccaccggggctgacaccctgccccacagggaatggccttggcctggcccagcccaagatcccagcgttatccaactcctggagggtggactctgtcctggcttgtttggtgtcctcagatat

SEQ ID NO: 456 - protein, 737 aa, Homo sapiens
MASCPDSDNSWVLAGSESLPVETLGPASRMDPESERALQAPHSPSKTDGKELAGTMDGEGTLFQTESPQSGSILTEETEVKGTLEGDVCGVEPPGPGDTVVQGDLQETTVVTGLGPDTQDLEGQSPPQSLPSTPKAAWIREEGRCSSSDDDTDVDMEGLRRRRGREAGPPQPMVPLAVENQAGGEGAGGELGISLNMCLLGALVLLGLGVLLFSGGLSESETGPMEEVERQVLPDPEVLEAVGDRQDGLREQLQAPVPPDSVPSLQNMGLLLDKLAKENQDIRLLQAQLQAQKEELQSLMHQPKGLEEENAQLRGALQQGEAFQRALESELQQLRARLQGLEADCVRGPDGVCLSGDRGPQGDKAIREQGPREQEPELSFLKQKEQLEAEAQALRQELERQRRLLGSVQQDLERSLQDASRGDPAHAGLAELGHRLAQKLQGLENWGQDPGVSANASKAWHQKSHFQNSREWSGKEKWWDGQRDRKAEHWKHKKEESGRERKKNWGGQEDREPAGRWKEGRPRVEESGSKKEGKRQGPKEPPRKSGSFHSSGEKQKQPRWREGTKDSHDPLPSWAELLRPKYRAPQGCSGVDECARQEGLTFFGTELAPVRQQELASLLRTYLARLPWAGQLTKELPLSPAFFGEDGIFRHDRLRFRDFVDALEDSLEEVAVQQTGDDDEVYDFEDFIFSHFFGDKALKKRPLPPHRSGKKDKHSQSPRAAGPREGHSHSHHHHHRG

SEQ ID NO: 457 - DNA, 1275 bp, Homo sapiens
  CDS (1)..(1272)
atggagcggctttggggtctattccagagagcgcaacaactgtccccaagatcctctcagaccgtctaccagcgtgtggaaggcccccggaaagggcacctggaggaggaagaggaagacggggaggagggggcggagacattggcccacttctgccccatggagctgaggggccctgagcccctgggctctagacccaggcagccaaacctcattccctgggcggcagcaggacggagggctgccccctacctggtcctgacggccctgctgatcttcactggggccttcctactgggctacgtcgccttccgagggtcctgccaggcgtgcggagactctgtgttggtggtcagtgaggatgtcaactatgagcctgacctggatttccaccagggcagactctactggagcgacctccaggccatgttcctgcagttcctgggggaggggcgcctggaggacaccatcaggcaaaccagccttcgggaacgggtggcaggctcggccgggatggccgctctgactcaggacattcgcgcggcgctctcccgccagaagctggaccacgtgtggaccgacacgcactacgtggggctgcaattcccggatccggctcaccccaacaccctgcactgggtcgatgaggccgggaaggtcggagagcagctgccgctggaggaccctgacgtctactgcccctacagcgccatcggcaacgtcacgggagagctggtgtacgcccactacgggcggcccgaagacctgcaggacctgcgggccaggggcgtggatccagtgggccgcctgctgctggtgcgcgtgggggtgatcagcttcgcccagaaggtgaccaatgctcaggacttcggggctcaaggagtgctcatatacccagagccagcggacttctcccaggacccacccaagccaagcctgtccagccagcaggcagtgtatggacatgtgcacctgggaactggagacccctacacacctggcttcccttccttcaatcaaacccagttccctccagttgcatcatcaggccttcccagcatcccagcccagcccatcagtgcagacattgcctcccgcctgctggaccacctgcggctgctgcgctccaacagctccgggacccccggggccacctcctccactggcttccaggagagccgtttccggcgtcagctagccctgctcacctggacgctgcaaggggcagccaatgcgcttagcggggatgtctggaacattgataacaacttctga

SEQ ID NO: 458 - protein, 424 aa, Homo sapiens
MERLWGLFQRAQQLSPRSSQTVYQRVEGPRKGHLEEEEEDGEEGAETLAHFCPMELRGPEPLGSRPRQPNLIPWAAAGRRAAPYLVLTALLIFTGAFLLGYVAFRGSCQACGDSVLVVSEDVNYEPDLDFHQGRLYWSDLQAMFLQFLGEGRLEDTIRQTSLRERVAGSAGMAALTQDIRAALSRQKLDHVWTDTHYVGLQFPDPAHPNTLHWVDEAGKVGEQLPLEDPDVYCPYSAIGNVTGELVYAHYGRPEDLQDLRARGVDPVGRLLLVRVGVISFAQKVTNAQDFGAQGVLIYPEPADFSQDPPKPSLSSQQAVYGHVHLGTGDPYTPGFPSFNQTQFPPVASSGLPSIPAQPISADIASRLLDHLRLLRSNSSGTPGATSSTGFQESRFRRQLALLTWTLQGAANALSGDVWNIDNNF

SEQ ID NO: 459 - DNA, 2857 bp, Homo sapiens
  CDS (28)..(1494)
  misc_feature (1421)..(1421): Wherein n may be a, c, g or t
  misc_feature (1420)..(1422): Wherein Xaa may be His or Pro or Arg or Leu
ctgcaggcttcaggaggggacacaagcatggagcggctttggggtctattccagagagcgcaacaactgtccccaagatcctctcagaccgtctaccagcgtgtggaaggcccccggaaagggcacctggaggaggaagaggaagacggggaggagggggcggagacattggcccacttctgccccatggagctgaggggccctgagcccctgggctctagacccaggcagccaaacctcattccctgggcggcagcaggacggagggctgccccctacctggtcctgacggccctgctgatcttcactggggccttcctactgggctacgtcgccttccgagggtcctgccaggcgtgcggagactctgtgttggtggtcagtgaggatgtcaactatgagcctgacctggatttccaccagggcagactctactggagcgacctccaggccatgttcctgcagttcctgggggaggggcgcctggaggacaccatcaggcaaaccagccttcgggaacgggtggcaggctcggccgggatggccgctgctgactcaggacattcgcgcggcctctcccgccagaagctggaccacgtgtggaccgacacgcactacgtggggctgcaattcccggatccggctcaccccaacaccctgcactgggtcgatgaggccgggaaggtcggagagcagctgccgctggaggaccctgacgtctactgcccctacagcgccatcggcaacgtcacgggagagctggtgtacgcccactacgggcggcccgaagacctgcaggacctgcgggccaggggcgtggatccagtgggccgcctgctgctggtgcgcgtgggggtgatcagcttcgcccagaaggtgaccaatgctcaggacttcggggctcaaggagtgctcatatacccagagccagcggacttctcccaggacccacccaagccaagcctgtccagccagcaggcagtgtatggacatgtgcacctgggaactggagacccctacacacctggcttcccttccttcaatcaaacccagttccctccagttgcatcatcaggccttcccagcatcccacgccgagccctatggagtctcaaaaaaaaaaagggccccgggccacgactgcggctagtggtcaacaatcacaggacctccacccccatcaacaacatcttcggctgcatcgaaggccgctcagagccagatcactacgttgtcatcggggcccagagggatgcatggggcccaggagcagctaaatccgctgtggggacggctatactcctggagctggtgcggaccttttcctccatggtgagcaacggcttccggccccgcagaagtctcctcttcatcagctgggacggtggtgactttggaagcgtgggctccacggagtggcntagagggctacctcagcgtgctgcacctcaaagccgtagtgtacgtgagcctggacaacgcagtgaagggggatgacaagtttcatgccaagaccaacccccttctgacaagtctcattgagaagtgtcctgaagcagatggattctcccaaccacagtgggcagactctctatgaacaggtggggttcaccaattcccagctgggattgctgaggtgatccggcccctacccatgggacagcagtgcctatttccttcacgggcctttgttggggagtcccttgcccttcgagttcttccttttattggagggacggaccaggccttacccatttccttgcacaaaaagggagggacacttattggaggaacctgcagtaaggtgctgcaaggccgcctgcccgccgtggcccaggccgtggcccagctcgcagggcagctcctcatccggctcagccacgatcgcctgctgcccctcgacttcggccgctacggggacgtcgtcctcaggcacatcgggaacctcaacgagttctctggggacctcaagcccgcgggctgaccctgcagtgggtgtactcggcgcggggggactacatccgggcggcggaaaagctgcggcaggtagatctacttgccgcagctcggaggagagagacgagcgactgacacgcatgtacaacgtgcgcataatgcgggtggagttctacttcctttcccagtacgtgtcgccagccgactccccgttccgccacatcttcatgggccgtggagaccacacgctgggcgccctgctggaccacctgcggctgctgcactccaacagctccgggacccccggggccacctcctccactggcttccagggagagccgtttccgggtcgtcagctagccctgctcacctggacgctgcaaggggcagccaatgcgcttagcggggatgtctggaacattgataacaacttctgaggccctggggatcctcaaatccccgtcccccagtcaagagctcctctgctcctcgcttgaatgattcagggtcagggaggtggctcagagtccacctctcattgctgatcaatttctcattacccctacacatctctccacggagcccagaccccagcacagatatccacacaccccagccctgcagtgtagctgaccctaatgtgacggtcatactgtcggttaatcagagagtagcatcccttcaatcacagccccttcccctttctggggtcctccatacctagagaccactctgggaggtttgctaggccctgggacctggccagctctgttagtgggagagatcgctggcaccatagccttatggccaacaggtggtctgtggtgaaaggggcgtggagtttcaatatcaataaaccacctgatatcaataaaaaaaaaaaaaaaaaaaaaaaaaaaaa

SEQ ID NO: 460 - protein, 489 aa, Homo sapiens
  misc_feature (465)..(465): Wherein Xaa may be any naturally occurring amino acid
MERLWGLFQRAQQLSPRSSQTVYQRVEGPRKGHLEEEEEDGEEGAETLAHFCPMELRGPEPLGSRPRQPNLIPWAAAGRRAAPYLVLTALLIFTGAFLLGYVAFRGSCQACGDSVLVVSEDVNYEPDLDFHQGRLYWSDLQAMFLQFLGEGRLEDTIRQTSLRERVAGSAGMAAADSGHSRGLSRQKLDHVWTDTHYVGLQFPDPAHPNTLHWVDEAGKVGEQLPLEDPDVYCPYSAIGNVTGELVYAHYGRPEDLQDLRARGVDPVGRLLLVRVGVISFAQKVTNAQDFGAQGVLIYPEPADFSQDPPKPSLSSQQAVYGHVHLGTGDPYTPGFPSFNQTQFPPVASSGLPSIPRRALWSLKKKKGPGPRLRLVVNNHRTSTPINNIFGCIEGRSEPDHYVVIGAQRDAWGPGAAKSAVGTAILLELVRTFSSMVSNGFRPRRSLLFISWDGGDFGSVGSTEWXRGLPQRAAPQSRSVREPGQRSEGG

SEQ ID NO: 461 - DNA, 865 bp, Homo sapiens
  CDS (27)..(836)
tgcgcgcggattctgcttctcagaagatgcactattatagatactctaacgccaaggtcagctgctggtacaagtacctccttttcagctacaacatcatcttctggttggctggagttgtcttccttggagtcgggctgtgggcatggagcgaaaagggtgtgctgtccgacctcaccaaagtgacccggatgcatggaatcgaccctgtggtgctggtcctgatggtgggcgtggtgatgttcaccctggggttcgccggctgcgtgggggctctgcgggagaatatctgcttgctcaactttttctgtggcaccatcgtgctcatcttcttcctggagctggctgtggccgtgctggccttcctgttccaggactgggtgagggaccggttccgggagttcttcgagagcaacatcaagtcctaccgggacgatatcgatctgcaaaacctcatcgactcccttcagaaagctaaccagtgctgtggcgcatatggccctgaagactgggacctcaacgtctacttcaattgcagcggtgccagctacagccgagagaagtgcggggtccccttctcctgctgcgtgccagatcctgtgcaaaaagttgtgaacacacagtgtggatatgatgtcaggattcagctgaagagcaagtgggatgagtccatcttcacgaaaggctgcatccaggcgctggaaagctggctcccgcggaacatttacattgtggctggcgtcttcatcgccatctcgctgttgcagatatttggcatcttcctggcaaggacgctgatctcagacatcgaggcagtgaaggccggccatcacttctgaggagcagagttgagggagccgagcta

SEQ ID NO: 462 - protein, 270 aa, Homo sapiens
MHYYRYSNAKVSCWYKYLLFSYNIIFWLAGVVFLGVGLWAWSEKGVLSDLTKVTRMHGIDPVVLVLMVGVVMFTLGFAGCVGALRENICLLNFFCGTIVLIFFLELAVAVLAFLFQDWVRDRFREFFESNIKSYRDDIDLQNLIDSLQKANQCCGAYGPEDWDLNVYFNCSGASYSREKCGVPFSCCVPDPVQKVVNTQCGYDVRIQLKSKWDESIFTKGCIQALESWLPRNIYIVAGVFIAISLLQIFGIFLARTLISDIEAVKAGHHF

SEQ ID NO: 463 - DNA, 863 bp, Homo sapiens
  CDS (26)..(835)
gcgcgcggattctgcttctcagaagatgcactattatagatactctaacgccaaggtcagctgctggtacaagtacctccttttcagctacaacatcatcttctggttggctggagttgtcttccttggagtcgggctgtgggcatggagcgaaaagggtgtgctgtccgacctcaccaaagtgacccggatgcatggaatcgaccctgtggtgctggtcctgatggtgggcgtggtgatgttcaccctggggttcgccggctgcgtgggggctctgcgggagaatatctgcttgctcaactttttctgtggcaccatcgtgctcatcttcttcctggagctggctgtggccgtgctggccttcctgttccaggactgggtgagggaccggttccgggagttcttcgagagcaacatcaagtcctaccgggacgatatcgatctgcaaaacctcatcgactcccttcagaaagctaaccagtgctgtggcgcatatggccctgaagactgggacctcaacgtctacttcaattgcagcggtgccagctacagccgagagaagtgcggggtccccttctcctgctgcgtgccagatcctgcgcaaaaagttgtgaacacacagtgtggatatgatgtcaggattcagctgaagagcaagtgggatgagtccatcttcacgaaaggctgcatccaggcgctggaaagctggctcccgcggaacatttacattgtggctggcgtcttcatcgccatctcgctgttgcagatatttggcatcttcctggcaaggacgctgatctcagacatcgaggcagtgaaggccggccatcacttctgaggagcagagttgagggagccgagct

SEQ ID NO: 464 - protein, 270 aa, Homo sapiens
MHYYRYSNAKVSCWYKYLLFSYNIIFWLAGVVFLGVGLWAWSEKGVLSDLTKVTRMHGIDPVVLVLMVGVVMFTLGFAGCVGALRENICLLNFFCGTIVLIFFLELAVAVLAFLFQDWVRDRFREFFESNIKSYRDDIDLQNLIDSLQKANQCCGAYGPEDWDLNVYFNCSGASYSREKCGVPFSCCVPDPAQKVVNTQCGYDVRIQLKSKWDESIFTKGCIQALESWLPRNIYIVAGVFIAISLLQIFGIFLARTLISDIEAVKAGHHF

SEQ ID NO: 465 - DNA, 2406 bp, Homo sapiens
  CDS (1)..(2403)
atggagcggctttggggtctattccagagagcgcaacaactgtccccaagatcctctcagaccgtctaccagcgtgtggaaggcccccggaaagggcacctggaggaggaagaggaagacggggaggagggggcggagacattggcccacttctgccccatggagctgaggggccctgagcccctgggctctagacccaggcagccaaacctcattccctgggcggcagcaggacggagggctgccccctacctggtcctgacggccctgctgatcttcactggggccttcctactgggctacgtcgccttccgagggtcctgccaggcgtgcggagactctgtgttggtggtcagtgaggatgtcaactatgagcctgacctggatttccaccagggcagactctactggagcgacctccaggccatgttcctgcagttcctgggggaggggcgcctggaggacaccatcaggcaaaccagccttcgggaacgggtggcaggctcggccgggatggccgctctgactcaggacattcgcgcggcgctctcccgccagaagctggaccacgtgtggaccgacacgcactacgtggggctgcaattcccggatccggctcaccccaacaccctgcactgggtcgatgaggccgggaaggtcggagagcagctgccgctggaggaccctgacgtctactgcccctacagcgccatcggcaacgtcacgggagagctggtgtacgcccactacgggcggcccgaagacctgcaggacctgcgggccaggggcgtggatccagtgggccgcctgctgctggtgcgcgtgggggtgatcagcttcgcccagaaggtgaccaatgctcaggacttcggggctcaaggagtgctcatatacccagagccagcggacttctcccaggacccacccaagccaagcctgtccagccagcaggcagtgtatggacatgtgcacctgggaactggagacccctacacacctggcttcccttccttcaatcaaacccagttccctccagttgcatcatcaggccttcccagcatcccagcccagcccatcagtgcagacattgcctcccgcctgctgaggaagctcaaaggccctgtggccccccaagaatggcaggggagcctcctaggctccccttatcacctgggccccgggccacgactgcggctagtggtcaacaatcacaggacctccacccccatcaacaacatcttcggctgcatcgaaggccgctcagagccagatcactacgttgtcatcggggcccagagggatgcatggggcccaggagcagctaaatccgctgtggggacggctatactcctggagctggtgcggaccttttcctccatggtgagcaacggcttccggccccgcagaagtctcctcttcatcagctgggacggtggtgactttggaagcgtgggctccacggagtggctagaaggctacctcagcgtgctgcacctcaaagccgtagtgtacgtgagcctggacaacgcagtgctgggggatgacaagtttcatgccaagaccagcccccttctgacaagtctcattgagagtgtcctgaagcaggtggattctcccaaccacagtgggcagactctctatgaacaggtggtgttcaccaatcccagctgggatgctgaggtgatccggcccctacccatggacagcagtgcctattccttcacggcctttgtgggagtccctgccgtcgagttctcctttatggaggacgaccaggcctacccattcctgcacacaaaggaggacacttatgagaacctgcataaggtgctgcaaggccgcctgcccgccgtggcccaggccgtggcccagctcgcagggcagctcctcatccggctcagccacgatcgcctgctgcccctcgacttcggccgctacggggacgtcgtcctcaggcacatcgggaacctcaacgagttctctggggacctcaaggcccgcgggctgaccctgcagtgggtgtactcggcgcggggggactacatccgggcggcggaaaagctgcggcaggagatctacagctcggaggagagagacgagcgactgacacgcatgtacaacgtgcgcataatgcgggtggagttctacttcctttcccagtacgtgtcgccagccgactccccgttccgccacatcttcatgggccgtggagaccacacgctgggcgccctgctggaccacctgcggctgctgcgctccaacagctccgggacccccggggccacctcctccactggcttccaggagagccgtttccggcgtcagctagccctgctcacctggacgctgcaaggggcagccaatgcgcttagcggggatgtctggaacattgataacaacttctga

SEQ ID NO: 466 - protein, 801 aa, Homo sapiens
MERLWGLFQRAQQLSPRSSQTVYQRVEGPRKGHLEEEEEDGEEGAETLAHFCPMELRGPEPLGSRPRQPNLIPWAAAGRRAAPYLVLTALLIFTGAFLLGYVAFRGSCQACGDSVLVVSEDVNYEPDLDFHQGRLYWSDLQAMFLQFLGEGRLEDTIRQTSLRERVAGSAGMAALTQDIRAALSRQKLDHVWTDTHYVGLQFPDPAHPNTLHWVDEAGKVGEQLPLEDPDVYCPYSAIGNVTGELVYAHYGRPEDLQDLRARGVDPVGRLLLVRVGVISFAQKVTNAQDFGAQGVLIYPEPADFSQDPPKPSLSSQQAVYGHVHLGTGDPYTPGFPSFNQTQFPPVASSGLPSIPAQPISADIASRLLRKLKGPVAPQEWQGSLLGSPYHLGPGPRLRLVVNNHRTSTPINNIFGCIEGRSEPDHYVVIGAQRDAWGPGAAKSAVGTAILLELVRTFSSMVSNGFRPRRSLLFISWDGGDFGSVGSTEWLEGYLSVLHLKAVVYVSLDNAVLGDDKFHAKTSPLLTSLIESVLKQVDSPNHSGQTLYEQVVFTNPSWDAEVIRPLPMDSSAYSFTAFVGVPAVEFSFMEDDQAYPFLHTKEDTYENLHKVLQGRLPAVAQAVAQLAGQLLIRLSHDRLLPLDFGRYGDVVLRHIGNLNEFSGDLKARGLTLQWVYSARGDYIRAAEKLRQEIYSSEERDERLTRMYNVRIMRVEFYFLSQYVSPADSPFRHIFMGRGDHTLGALLDHLRLLRSNSSGTPGATSSTGFQESRFRRQLALLTWTLQGAANALSGDVWNIDNNF

SEQ ID NO: 467 - DNA, 2531 bp, Homo sapiens
  CDS (65)..(2467)
ctgcaggcttcaggaggggtactctgccttctggacactgcaggcttcaggaggggacacaagcatggagcggctttggggtctattccagagagcgcaacaactgtccccaagatcctctcagaccgtctaccagcgtgtggaaggcccccggaaagggcacctggaggaggaagaggaagacggggaggagggggcggagacattggcccacttctgccccatggagctgaggggccctgagcccctgggctctagacccaggcagccaaacctcattccctgggcggcagcaggacggagggctgccccctacctggtcctgacggccctgctgatcttcactggggccttcctactgggctacgtcgccttccgagggtcctgccaggcgtgcggagactctgtgttggtggtcagtgaggatgtcaactatgagcctgacctggatttccaccagggcagactctactggagcgacctccaggccatgttcctgcagttcctgggggaggggcgcctggaggacaccatcaggcaaaccagccttcgggaacgggtggcaggctcggccgggatggccgctctgactcaggacattcgcgcggcgctctcctgccagaagctggaccacgtgtggaccgacacgcactacgtggggctgcaattcccggatccggctcaccccaacaccctgcactgggtcgatgaggccgggaaggtcggagagcagctgccgctggaggaccctgacgtctactgcccctacagcgccatcggcaacgtcacgggagagctggtgtacgcccactacgggcggcccgaagacttgcaggacctgcgggccaggggcgtggatccagtgggccgcctgctgctggtgcgcgtgggggtgatcagcttcgcccagaaggtgaccaatgctcaggacttcggggctcaaggagtgctcatatacccagagccagcggacttctcccaggacccacccaagccaagcctgtccagccagcaggcagtgtatggacatgtgcacctgggaactggggacccctacacacctggcttcccttccttcaatcaaacccagttccctccagttgcatcatcaggccttcccagcatcccagcccagcccatcagtgcagacattgcctcccgcctgctgaggaagctcaaaggccctgtggccccccaagaatggcaggggagcctcctaggctccccttatcacctgggccccgggccacgactgcggctagtggtcaacaatcacaggacctccacccccatcaacaacatcttcggctgcatcgaaggccgctcagagccagatcactacgttgtcatcggggcccagagggatgcatggggcccaggagcagctaaatccgctgtggggacggctatactcctggagctggtgcggaccttttcctccatggtgagcaacggcttccggccccgcagaagtctcctcttcatcagctgggacggtggtgactttggaagcgtgggctccacggagtggctagagggctacctcagcgtgctgcacctcaaagccgtagtgtacgtgagcctggacaacgcagtgctgggggatgacaagtttcatgccaagaccagcccccttctgacaagtctcattgagagtgtcctgaagcaggtggattctcccaaccacagtgggcagactctctatgaacaggtggtgttcaccaatcccagctgggatgctgaggtgatccggcccctacccatggacagcagtgcctattccttcacggcctttgtgggagtccctgccgtcgagttctcctttatggaggacgaccaggcctacccattcctgcacacaaaggaggacacttatgagaacctgcataaggtgctgcaaggccgcctgcccgctgtggcccaggccgtggcccagcccgcagggcagctcctcatccggctcagccacgatcgcctgctgcccctcgacttcggccgctacggggacgtcgtcctcaggcacatcgggaacctcaacgagttctctggggacctcaaggcccgcgggctgaccctgcagtgggtgtactcggcgcggggggactacatccgggcggcggaaaagctgcggcaggagatctacagctcggaggagagagacgagcgactgacacgcatgtacaacgtgcgcataatgcgggtggagttctacttcctttcccagtacgtgtcgccagccgactccccgttccgccacatcttcatgggccgtggagaccacacgctgggcgccctgctggaccacctgcggctgctgcgctccaacagctccgggacccccggggccacctcctccactggcttccaggagagccgtttccggcgtcagctagccctgctcacctggacgctgcaaggggcagccaatgcgcttagcggggatgtctggaacattgataacaacttctgaggccctggggatcctcacatccccgtcccccagtcaagagctcctctgcacctcgacttga

SEQ ID NO: 468 - protein, 801 aa, Homo sapiens
MERLWGLFQRAQQLSPRSSQTVYQRVEGPRKGHLEEEEEDGEEGAETLAHFCPMELRGPEPLGSRPRQPNLIPWAAAGRRAAPYLVLTALLIFTGAFLLGYVAFRGSCQACGDSVLVVSEDVNYEPDLDFHQGRLYWSDLQAMFLQFLGEGRLEDTIRQTSLRERVAGSAGMAALTQDIRAALSCQKLDHVWTDTHYVGLQFPDPAHPNTLHWVDEAGKVGEQLPLEDPDVYCPYSAIGNVTGELVYAHYGRPEDLQDLRARGVDPVGRLLLVRVGVISFAQKVTNAQDFGAQGVLIYPEPADFSQDPPKPSLSSQQAVYGHVHLGTGDPYTPGFPSFNQTQFPPVASSGLPSIPAQPISADIASRLLRKLKGPVAPQEWQGSLLGSPYHLGPGPRLRLVVNNHRTSTPINNIFGCIEGRSEPDHYVVIGAQRDAWGPGAAKSAVGTAILLELVRTFSSMVSNGFRPRRSLLFISWDGGDFGSVGSTEWLEGYLSVLHLKAVVYVSLDNAVLGDDKFHAKTSPLLTSLIESVLKQVDSPNHSGQTLYEQVVFTNPSWDAEVIRPLPMDSSAYSFTAFVGVPAVEFSFMEDDQAYPFLHTKEDTYENLHKVLQGRLPAVAQAVAQPAGQLLIRLSHDRLLPLDFGRYGDVVLRHIGNLNEFSGDLKARGLTLQWVYSARGDYIRAAEKLRQEIYSSEERDERLTRMYNVRIMRVEFYFLSQYVSPADSPFRHIFMGRGDHTLGALLDHLRLLRSNSSGTPGATSSTGFQESRFRRQLALLTWTLQGAANALSGDVWNIDNNF

SEQ ID NO: 469 - DNA, 458 bp, Homo sapiens
  CDS (61)..(342)
tcttcattctttccgccatcttgattctttctcactgaccaagactcagccgtgggaaatatgagtgagcttgtaagaacaacatcccaatcctcagaaagaggaaatgaccaagagtcttcccagccagttggatctgtgattgtccaggagcccactgaggaaaagcgtcaagaagaggaaccaccaactgataatcaggggcctgacatggaagcttttcaacaggaactggctctgcttaagatagaggatgagcctggagatggtcctgatgtcagggagggtattatgcccacttttgatctcactaaagtgctggaagcaggtgatgcgcaaccataggtttcaagcaagacaaatgaagactgaaaccaagaacgttattcttaatctggaaatttgactgataatattctcttaataaagttttaagttttctgcaaagaatccttaaa

SEQ ID NO: 470 - protein, 94 aa, Homo sapiens
MSELVRTTSQSSERGNDQESSQPVGSVIVQEPTEEKRQEEEPPTDNQGPDMEAFQQELALLKIEDEPGDGPDVREGIMPTFDLTKVLEAGDAQP

SEQ ID NO: 471 - DNA, 458 bp, Homo sapiens
  CDS (61)..(342)
tcttcattctttccgccatcttgattctttctcactgaccaagactcagccgtgggaaatatgagtgagcttgtaagagcaagatcccaatcctcagaaagaggaaatgaccaagagtcttcccagccggttggatctgtgattgtccaggagcccactgaggaaaaacgtcaagaagaggaaccaccaactgataatcaggggcctgacatggaagcttttcaacaggaactggctctgcttaagatagaggatgagcctggagatggtcctgatgtcagggagggtattatgcccacttttgatctcactaaagtgctggaagcaggtgatgcgcaaccataggtttcaagcaagacaaatgaagactgaaaccaagaacgttattcttaatctggaaatttgactgataatattctcttaataaagttttaagttttctgcaaagaatccttaaa

SEQ ID NO: 472 - protein, 94 aa, Homo sapiens [sequence omitted]

SEQ ID NO: 473 - DNA, 336 bp, Homo sapiens
  CDS (1)..(111)
tggttgcgcatcacctgcttccagcactttagtgagatcaaaagtgggcataataccctccctgacatcaggaccatctccaggctcatcctctatcttaagcagagccagttcctgttgaaaagcttccatgtcaggcccttgaaaagcaggcactgcttgattttcaatctccccactaggtgcaataccctgattatcagttggtggttcctcttcttgacgtttttcctcagtgggctcctggacaatcacagatccaaccggctgggaagactcttggtcatttcctctttctgaggattgggatcttgctcttacaagctcactcatggt

SEQ ID NO: 474 - protein, 37 aa, Homo sapiens
WLRITCFQHFSEIKSGHNTLPDIRTISRLILYLKQSQ

SEQ ID NO: 475 - DNA, 501 bp, Homo sapiens
  CDS (25)..(357)
gggaagagaccatgtgtgggaaatatgagtgagcttgtaagaacaagatcccaatcctcagaaagaggaaatgaccaagagtcttcccagccggttggatctgtgattgtccaggagcccactgaggaaaaacgtcaagaagaggaaccaccaactgataatcagggtattgcacctagtggggagattgaaaatcaagcagtgcctgcttttcaagggcctgacatggaagcttttcaacaggaactggctctgcttaagatagaggatgagcctggagatggtcctgatgtcagggagggtattatgcccacttttgatctcactaaagtgctggaagcaggtgatgcgcaaccataggtttcaagcaagacaaatgaagactgaaaccaagaacgttattcttaatctggaaatttgactgataatattctcttaataaagttttaagttttctgcaaagaatcctcaaaaaaaaaaaaaaaaaaaaaaaaaaaaggg

SEQ ID NO: 476 - protein, 111 aa, Homo sapiens
MSELVRTRSQSSERGNDQESSQPVGSVIVQEPTEEKRQEEEPPTDNQGIAPSGEIENQAVPAFQGPDMEAFQQELALLKIEDEPGDGPDVREGIMPTFDLTKVLEAGDAQP

SEQ ID NO: 477 - DNA, 374 bp, Homo sapiens
  CDS (23)..(355)
gaagagaccatgtgtgggaaatatgagtgagcttgtaagagcaagatcccaatcctcagaaagaggaaatgaccaagagtcttcccagccggttggatctgtgattgtccaggagcccactgaggaaaaacgtcaagaagaggaaccaccaactgataatcagggtattgcacctagtggggagattgaaaatcaagcagtgcctgcttttcaagggcctgacatggaagcttttcaacaggaactggctctgcttaagatagaggatgagcctggagatggtcctgatgtcagggagggtattatgcccacttttgatctcactaaagtgctggaagcaggtgatgcgcaaccataggtttcaagcaagacaa

SEQ ID NO: 478 - protein, 111 aa, Homo sapiens [sequence omitted]

SEQ ID NO: 479 - DNA, 337 bp, Homo sapiens
  CDS (1)..(333)
atgagtgagcatgtgagaacaacatcccaatcctcagaaagaggaaatgaccaagagtcttcccagccagttggatctgtgattgtccaggagcccactgaggaaaaacgtcaagaagaggaaccaccaactgataatcagggtattgcacctagtggggagatcgaaaatgaaggagcacctgccgttcaagggcctgacatggaagcttttcaacaggaactggctctgcttaagatagaggatgagcctggagatggtcctgatgtcagggaggggattatgcccacttttgatctcactaaagtgctggaagcaggtgatgcgcaaccatagt

SEQ ID NO: 480 - protein, 111 aa, Homo sapiens
MSEHVRTTSQSSERGNDQESSQPVGSVIVQEPTEEKRQEEEPPTDNQGIAPSGEIENEGAPAVQGPDMEAFQQELALLKIEDEPGDGPDVREGIMPTFDLTKVLEAGDAQP

SEQ ID NO: 481 - DNA, 344 bp, Homo sapiens
  CDS (9)..(341)
gtggaaatatgattgagcatgtgagaacaatatcccaatcctcagaaagaggaaatgaccaagagtcttcccacccagttggatctgtgattgtccaggagcccactgaggaaaaacgtcaagaagaggaaccaccaactgataatcagggtattgcacctagtggggagatcgaaaatgaaggagcacctgccgttcaagggcctgacatggaagcttttcaacaggaactggctctgcttaagatagaggatgagcctggagatggtcctgatgtcagggaggggattatgcccacttttgatctcactagagtgctggaagcaggtgatgcgcaaccatag

SEQ ID NO: 482 - protein, 111 aa, Homo sapiens
MIEHVRTISQSSERGNDQESSHPVGSVIVQEPTEEKRQEEEPPTDNQGIAPSGEIENEGAPAVQGPDMEAFQQELALLKIEDEPGDGPDVREGIMPTFDLTRVLEAGDAQP

SEQ ID NO: 483 - DNA, 343 bp, Homo sapiens
  CDS (8)..(340)
gggaaatatgagtgagcatgtgagaacaagatcccaatcctcagaaagaggaaatgaccaagagtcttcccagccagttggatctgtgattgtccaggagcccactgaggaaaaacgtcaagaagaggaaccaccaactgataatcagggtattgcgcctagtggggagatcgaaaatgaaggagcacctgccgttcaagggcctgacatggaagcttttcaacaggaactggctctgcttaagatagaggatgagcctggagatggtcctgatgtcagggaggggattatgcccacttttgatctcactaaagtgctggaagcaggtgatgcgcaaccatag

SEQ ID NO: 484 - protein, 111 aa, Homo sapiens
MSEHVRTRSQSSERGNDQESSQPVGSVIVQEPTEEKRQEEEPPTDNQGIAPSGEIENEGAPAVQGPDMEAFQQELALLKIEDEPGDGPDVREGIMPTFDLTKVLEAGDAQP

SEQ ID NO: 485 - DNA, 475 bp, Homo sapiens
  CDS (25)..(357)
gggaagagaccatgtgtgggaaatatgagtgagcatgtgagaacaagatcccaatcctcagaaagaggaaatgaccaagagtcttcccagccagttggatctgtgattgtccaggagcccactgaggaaaaacgtcaagaagaggaaccaccaactgataatcagggtattgcacctagtggggagatcgaaaatgaaggagcacctgccgttcaagggcctgacatggaagcttttcaacaggaactggctctgcttaagatagaggatgagcctggagatggtcctgatgtcagggaggggattatgcccacttttgatctcactaaagtgctggaagcaggtgatgcgcaaccataggtttcaagcaagacaaatgaagactgaaaccaagaacgttattcttaatctggaaatttgactgataatattctcttaataaagttttaagttttctgcaaagaaaaaaaaaaaa

SEQ ID NO: 486 - protein, 111 aa, Homo sapiens; identical to SEQ ID NO: 484

SEQ ID NO: 487 - DNA, 344 bp, Homo sapiens
  CDS (9)..(341)
tgggaaatatgagtgagcatgtgagaacaacatcccaatcctcagaaagaggaaatgaccaagagtcttcccagccagttgtatctgtgattgtccaggagcccactgaggaaaaacgtcaagaagaggaaccaccaactgataatcagggtattgcacctagtggggagatcgaaaatgaaggagcacctgccgttcaagggcctgacatggaagcttttcaacaggaactggctctgcttaagatagaggatgagcctggagatggtcctgatgtcagggaggggattatgcccacttttgatctcactaaagtgctggaagcaggtgatgcgcaaccatag

SEQ ID NO: 488 - protein, 111 aa, Homo sapiens
MSEHVRTTSQSSERGNDQESSQPVVSVIVQEPTEEKRQEEEPPTDNQGIAPSGEIENEGAPAVQGPDMEAFQQELALLKIEDEPGDGPDVREGIMPTFDLTKVLEAGDAQP

SEQ ID NO: 489 - DNA, 2165 bp, Homo sapiens
  CDS (153)..(1193)
agaacagcgcagtttgccctccgctcacgcagagcctctccgtggcctccgcaccttgagcattaggccagttctcctcttctctctaatccatccgtcacctctcctgtcatccgtttccatgccgtgaggtccattcacagaacacatccatggctctcatgctcagtttggttctgagtctcctcaagctgggatcagggcagtggcaggtgtttgggccagacaagcctgtccaggccttggtgggggaggacgcagcattctcctgtttcctgtctcctaagaccaatgcagaggccatggaagtgcggttcttcaggggccagttctctagcgtggtccacctctacagggacgggaaggaccagccatttatgcagatgccacagtatcaaggcaggacaaaactggtgaaggattctattgcggaggggcgcatctctctgaggctggaaaacattactgtgttggatgctggcctctatgggtgcaggattagttcccagtcttactaccagaaggccatctgggagctacaggtgtcagcactgggctcagttcctctcatttccatcacgggatatgttgatagagacatccagctactctgtcagtcctcgggctggttcccccggcccacagcgaagtggaaaggtccacaaggacaggatttgtccacagactccaggacaaacagagacatgcatggcctgtttgatgtggagatctctctgaccgtccaagagaacgccgggagcatatcctgttccatgcggcatgctcatctgagccgagaggtggaatccagggtacagataggagatacctttttcgagcctatatcgtggcacctggctaccaaagtactgggaatactctgctgtggcctattttttggcattgttggactgaagattttcttctccaaattccagtgtaagcgagagagagaagcatgggccggtgccttattcatggttccagcagggacaggatcagagatgctcccacatccagctgcttctcttcttctagtcctagcctccaggggcccaggcccaaaaaaggaaaatccaggcggaactggactggagaagaaagcacggacaggcagaattgagagacgcccggaaacacgcagtggaggtgactctggatccagagacggctcacccgaagctctgcgtttctgatctgaaaactgtaacccatagaaaagctccccaggaggtgcctcactctgagaagagatttacaaggaagagtgtggtggcttctcagagtttccaagcagggaaacattactgggaggtggacggaggacacaataaaaggtggcgcgtgggagtgtgccgggatgatgtggacaggaggaaggagtacgtgactttgtctcccgatcatgggtactgggtcctcagactgaatggagaacatttgtatttcacattaaatccccgttttatcagcgtcttccccaggaccccacctacaaaaataggggtcttcctggactatgagtgtgggaccatctccttcttcaacataaatgaccagtcccttatttataccctgacatgtcggtttgaaggcttattgaggccctacattgagtatccgtcctataatgagcaaaatggaactcccatagtcatctgcccagtcacccaggaatcagagaaagaggcctcttggcaaagggcctctgcaatcccagagacaagcaacagtgagtcctcctcacaggcaaccacgcccttcctccccaggggtgaaatgtaggatgaatcacatcccacattcttctttagggatattaaggtctctctcccagatccaaagtcccgcagcagccggccaaggtggcttccagatgaagggggactggcctgtccacatgggagtcaggtgtcatggctgccctgagctgggagggaagaaggctgacattacatttagtttgctctcactccatctggctaagtgatcttgaaataccacctctcaggtgaagaaccgtcaggaattcccatctcacaggctgtggtgtagattaagtagacaaggaatgtgaataatgcttagatcttattgatgacagagtgtatcctaatggtttgttcattatattacactttcagtaaaaaaaaaaaaaaaaaaaa

SEQ ID NO: 490 - protein, 347 aa, Homo sapiens
MALMLSLVLSLLKLGSGQWQVFGPDKPVQALVGEDAAFSCFLSPKTNAEAMEVRFFRGQFSSVVHLYRDGKDQPFMQMPQYQGRTKLVKDSIAEGRISLRLENITVLDAGLYGCRISSQSYYQKAIWELQVSALGSVPLISITGYVDRDIQLLCQSSGWFPRPTAKWKGPQGQDLSTDSRTNRDMHGLFDVEISLTVQENAGSISCSMRHAHLSREVESRVQIGDTFFEPISWHLATKVLGILCCGLFFGIVGLKIFFSKFQCKREREAWAGALFMVPAGTGSEMLPHPAASLLLVLASRGPGPKKENPGGTGLEKKARTGRIERRPETRSGGDSGSRDGSPEALRF

SEQ ID NO: 491 - DNA, 1969 bp, Homo sapiens
  CDS (95)..(1594)
agcattaggccagttctcctcttctctctaatccatccgtcacctctcctgtcatccgtttccatgccgtgaggtccattcacagaacacatccatggctctcatgctcagtttggttctgagtctcctcaagctgggatcagggcagtggcaggtgtttgggccagacaagcctgtccaggccttggtgggggaggacgcagcattctcctgtttcctgtctcctaagaccaatgcagaggccatggaagtgcggttcttcaggggccagttctctagcgtggtccacctctacagggacgggaaggaccagccatttatgcagatgccacagtatcaaggcaggacaaaactggtgaaggattctattgcggaggggcgcatctctctgaggctggaaaacattactgtgttggatgctggcctctatgggtgcaggattagttcccagtcttactaccagaaggccatctgggagctacaggtgtcagcactgggctcagttcctctcatttccatcacgggatatgttgatagagacatccagctactctgtcagtcctcgggctggttcccccggcccacagcgaagtggaaaggtccacaaggacaggatttgtccacagactccaggacaaacagagacatgcatggcctgtttgatgtggagatctctctgaccgtccaagagaacgccgggagcatatcctgttccatgcggcatgctcatctgagccgagaggtggaatccagggtacagataggagatacctttttcgagcctatatcgtggcacctggctaccaaagtactgggaatactctgctgtggcctattttttggcattgttggactgaagattttcttctccaaattccagtggaaaatccaggcggaactggactggagaagaaagcacggacaggcagaattgagagacgcccggaaacacgcagtggaggtgactctggatccagagacggctcacccgaagctctgcgtttctgatctgaaaactgtaacccatagaaaagctccccaggaggtgcctcactctgagaagagatttacaaggaagagtgtggtggcttctcagagtttccaagcagggaaacattactgggaggtggacggaggacacaataaaaggtggcgcgtgggagtgtgccgggatgatgtggacaggaggaaggagtacgtgactttgtctcccgatcatgggtactgggtcctcagactgaatggagaacatttgtatttcacattaaatccccgttttatcagcgtcttccccaggaccccacctacaaaaataggggtcttcctggactatgagtgtgggaccatctccttcttcaacataaatgaccagtcccttatttataccctgacatgtcggtttgaaggcttattgaggccctacattgagtatccgtcctataatgagcaaaatggaactcccatagtcatctgcccagtcacccaggaatcagagaaagaggcctcttggcaaagggcctctgcaatcccagagacaagcaacagtgaatcctcctcacaggcaaccacgcccttcctccccaggggtgaaatgtaggatgaatcacatcccacattcttctttagggatattaaggtctctctcccagatccaaagtcccgcagcagccggccaaggtggcttccagatgaagggggactggcctgtccacatgggagtcaggtgtcatggctgccctgagctgggagggaagaaggctgacattacatttagtttgctctcactccatctggctaagtgatcttgaaataccacctctcaggtgaagaaccgtcaggaattcccatctcacaggctgtggtgtagattaagtagacaaggaatgtgaataatgcttagatcttattgatgacagagtgtatcctaatggtttgttcattatattacactttcagtaaaaaaaaaaaa

SEQ ID NO: 492 - protein, 500 aa, Homo sapiens
MALMLSLVLSLLKLGSGQWQVFGPDKPVQALVGEDAAFSCFLSPKTNAEAMEVRFFRGQFSSVVHLYRDGKDQPFMQMPQYQGRTKLVKDSIAEGRISLRLENITVLDAGLYGCRISSQSYYQKAIWELQVSALGSVPLISITGYVDRDIQLLCQSSGWFPRPTAKWKGPQGQDLSTDSRTNRDMHGLFDVEISLTVQENAGSISCSMRHAHLSREVESRVQIGDTFFEPISWHLATKVLGILCCGLFFGIVGLKIFFSKFQWKIQAELDWRRKHGQAELRDARKHAVEVTLDPETAHPKLCVSDLKTVTHRKAPQEVPHSEKRFTRKSVVASQSFQAGKHYWEVDGGHNKRWRVGVCRDDVDRRKEYVTLSPDHGYWVLRLNGEHLYFTLNPRFISVFPRTPPTKIGVFLDYECGTISFFNINDQSLIYTLTCRFEGLLRPYIEYPSYNEQNGTPIVICPVTQESEKEASWQRASAIPETSNSESSSQATTPFLPRGEM

SEQ ID NO: 493 - DNA, 252 bp, Homo sapiens
atgaacccggtacctcagatggaaatgcagaaatcacccatgttctgcgtcgctcactctgggagctgtagaccggagctgttcctattcggccatcttggctcctccccctcactacaaagggttttgatgatttatcttttgtatgtcttcccacagggcagtggcaggtgtttgggccagacaagcctgtccaggccttggtgggggaggacgcagcattctcctgtttcctgtctcctaaaaccaatg

SEQ ID NO: 494 - protein, 84 aa, Homo sapiens
MNPVPQMEMQKSPMFCVAHSGSCRPELFLFGHLGSSPSLQRVLMIYLLYVFPQGSGRCLGQTSLSRPWWGRTQHSPVSCLLKPM

SEQ ID NO: 495 - DNA, 1495 bp, Homo sapiens
  CDS (1)..(1491)
atgaacccggtacctcagatggaaatgcagaaatcacccatgttctgcgtcgctcactctgggagctgtagaccggagctgttcctattcggccatcttggctcctccccctcactacaaagggttttgatgatttatcttttgtatgtcttcccacagggcagtggcaggtgtttgggccagacaagcctgtccaggccttggtgggggaggacgcagcattctcctgtttcctgtctcctaaaaccaatgcagaggccatggaagtgcggttcttcaggggccagttctctagcgtggtccacctctacagggacgggaaggaccagccatttatgcagatgccacagtatcaaggcaggacaaaactgtgaaggattctattgcggaggggcgcatctctcgaggctggaaaacattactgtgttggatgctggcctctatgggtgcaggattagttcccagtcttactaccagaaggccatctgggagctacaggtgtcagcactgggctcagttcctctcatttccatcacgggatatgttgatagagacatccagctactctgtcagtcctcgggctggttcccccggcccgtgcaaggagccagcgtcgtgtttgtgccttgtacactcctgtgtccaccactgaatatactgtttctgtttcagggaaaatccaggcggaactgggtaagtatgtgtcatgtcctgagcctcccacacatggttctcccgggtccctccctgatccacagtttgagcctctggacgaccctggctgcaggctggacaggaagcaccgactggagaagaaagcacggacaggcagaattgagagacgcccggaaacacgcagtggaggtgactctggatccagagacggctcacccgaagctctgcgtttctgatctgaaaactgtaacccatagaaaagctccccaggaggtgcctcactctgagaagagatttacaaggaagagtgtggtggcttctcagagtttccaagcagggaaacattactgggaggtggacggaggacacaataaaaggtggcgcgtgggagtgtgccgggatgatgtggacaggaggaaggagtacgtgactttgtctcccgatcatgggtactgggtcctcagactgaatggagaacatttgtatttcacattaaatccccgttttatcagcgtcttccccaggaccccacctacaaaaataggggtcttcctggactatgagtgtgggaccatctccttcttcaacataaatgaccagtcccttatttataccctgacatgtcggtttgaaggcttattgaggccctacattgagtatccgtcctataatgagcaaaatggaactcccatagtcatctgcccagtcacccaggaatcagagaaagaggcctcttggcaaagggcctctgcaatcccagagacaagcaacagtgaagtcctcctcacaggcaaccacgcccttcctccccaggggtgaa

SEQ ID NO: 496 - protein, 497 aa, Homo sapiens [sequence omitted]

SEQ ID NO: 497 - DNA, 661 bp, Homo sapiens
  CDS (11)..(652)
caccaagcttcagtggcaggtgtttgggccagacaagcctgtccaggccttggtgggggaggacgcagcattctcctgtttcctgtctcctaagaccaatgcagaggccatggaagtgcggttcttcaggggccagttctctagcgtggtccacctctacagggacgggaaggaccagccatttatgcagatgccacagtatcaaggcaggacaaaactggtgaaggattctattgcggaggggcgcatctctctgaggctggaaaacattactgtgttggatgctggcctctatgggtgcaggattagttcccagtcttactaccagaaggccatctgggagctacaggtgtcagcactgggctcagttcctctcatttccatcacgggatatgttgatagagacatccagctactctgtcagtcctcgggctggttcccccggcccacagcgaagtggaaaggtccacaaggacaggatttgtccacagactccaggacaaacagagacatgcatggcctgtttgatgtggagatctctctgaccgtccaagagaacgccgggagcatatcctgttccatgcggcatgctcatctgagccgagaggtggaatccagggtacagataggagatacctttttcgagcctatactcgagggc

SEQ ID NO: 498 - protein, 214 aa, Homo sapiens
QWQVFGPDKPVQALVGEDAAFSCFLSPKTNAEAMEVRFFRGQFSSVVHLYRDGKDQPFMQMPQYQGRTKLVKDSIAEGRISLRLENITVLDAGLYGCRISSQSYYQKAIWELQVSALGSVPLISITGYVDRDIQLLCQSSGWFPRPTAKWKGPQGQDLSTDSRTNRDMHGLFDVEISLTVQENAGSISCSMRHAHLSREVESRVQIGDTFFEPI

SEQ ID NO: 499 - DNA, 1066 bp, Homo sapiens
  CDS (17)..(1057)
caccaagcttcccaccatggctctcatgctcagtttggttctgagtctcctcaagctgggatcagggcagtggcaggtgtttgggccagacaagcctgtccaggccttggtgggggaggacgcagcattctcctgtttcctgtctcctaagaccaatgcagaggccatggaagtgcggttcttcaggggccagttctctagcgtggtccacctctacagggacgggaaggaccagccatttatgcagatgccacagtatcaaggcaggacaaaactggtgaaggattctattgcggaggggcgcatctctctgaggctggaaaacattactgtgttggatgctggcctctatgggtgcaggattagttcccagtcttactaccagaaggccatctgggagctacaggtgtcagcactgggctcagttcctctcatttccatcacgggatatgttgatagagacatccagctactctgtcagtcctcgggctggttcccccggcccacagcgaagtggaaaggtccacaaggacaggatttgtccacagactccaggacaaacagagacatgcatggcctgtttgatgtggagatctctctgaccgtccaagagaacgccgggagcatatcctgttccatgcggcatgctcatctgagccgagaggtggaatccagggtacagataggagatacctttttcgagcctatatcgtggcacctggctaccaaagtactgggaatactctgctgtggcctattttttggcattgttggactgaagattttcttctccaaattccagtgtaagcgagagagagaagcatgggccggtgccttattcatggttccagcagggacaggatcagagatgctcccacatccagctgcttctcttcttctagtcctagcctccaggggcccaggcccaaaaaaggaaaatccaggcggaactggactggagaagaaagcacggacaggcagaattgagagacgcccggaaacacgcagtggaggtgactctggatccagagacggctcacccgaagctctgcgtttcctcgagggc

SEQ ID NO: 500 - protein, 347 aa, Homo sapiens; identical to SEQ ID NO: 490

SEQ ID NO: 501 - DNA, 1969 bp, Homo sapiens
  CDS (95)..(1594)
agcattaggccagttctcctcttctctctaatccatccgtcacctctcctgtcatccgtttccatgccgtgaggtccattcacagaacacatccatggctctcatgctcagtttggttctgagtctcctcaagctgggatcagggcagtggcaggtgtttgggccagacaagcctgtccaggccttggtgggggaggacgcagcattctcctgtttcctgtctcctaagaccaatgcagaggccatggaagtgcggttcttcaggggccagttctctagcgtggtccacctctacagggacgggaaggaccagccatttatgcagatgccacagtatcaaggcaggacaaaactggtgaaggattctattgcggaggggcgcatctctctgaggccggaaaacattactgtgttggatgctggcctctatgggtgcaggattagttcccagtcttactaccagaaggccatctgggagctacaggtgtcagcactgggctcagttcctctcatttccatcacgggatatgttgatagagacatccagctactctgtcagtcctcgggctggttcccccggcccacagcgaagtggaaaggtccacaaggacaggatttgtccacagactccaggacaaacagagacatgcatggcctgtttgatgtggagatctctctgaccgtccaagagaacgccgggagcatatcctgttccatgcggcatgctcatctgagccgagaggtggaatccagggtacagataggagatacctttttcgagcctatatcgtggcacctggctaccaaagtactgggaatactctgctgtggcctattttttggcattgttggactgaagattttcttctccaaattccagtggaaaatccaggcggaactggactggagaagaaagcacggacaggcagaattgagagacgcccggaaacacgcagtggaggtgactctggatccagagacggctcacccgaagctctgcgtttctgatctgaaaactgtaacccatagaaaagctccccaggaggtgcctcactctgagaagagatttacaaggaagagtgtggtggcttctcagagtttccaagcagggaaacattactgggaggtggacggaggacacaataaaaggtggcgcgtgggagtgtgccgggatgatgtggacaggaggaaggagtacgtgactttgtctcccgatcatgggtactgggtcctcagactgaatggagaacatttgtatttcacattaaatccccgttttatcagcgtcttccccaggaccccacctacaaaaataggggtcttcctggactatgagtgtgggaccatctccttcttcaacataaatgaccagtcccttatttataccctgacatgtcggtttgaaggcttattgaggccctacattgagtatccgtcctataatgagcaaaatggaactcccatagtcatctgcccagtcacccaggaatcagagaaagaggcctcttggcaaagggcctctgcaatcccagagacaagcaacagtgaatcctcctcacaggcaaccacgcccttcctccccaggggtgaaatgtaggatgaatcacatcccacattcttctttagggatattaaggtctctctcccagatccaaagtcccgcagcagccggccaaggtggcttccagatgaagggggactggcctgtccacatgggagtcaggtgtcatggctgccctgagctgggagggaagaaggctgacattacatttagtttgctctcactccatctggctaagtgatcttgaaataccacctctcaggtgaagaaccgtcaggaattcccatctcacaggctgtggtgtagattaagtagacaaggaatgtgaataatgcttagatcttattgatgacagagtgtatcctaatggtttgttcattatattacactttcagtaaaaaaaaaaaa

SEQ ID NO: 502 - protein, 500 aa, Homo sapiens
MALMLSLVLSLLKLGSGQWQVFGPDKPVQALVGEDAAFSCFLSPKTNAEAMEVRFFRGQFSSVVHLYRDGKDQPFMQMPQYQGRTKLVKDSIAEGRISLRPENITVLDAGLYGCRISSQSYYQKAIWELQVSALGSVPLISITGYVDRDIQLLCQSSGWFPRPTAKWKGPQGQDLSTDSRTNRDMHGLFDVEISLTVQENAGSISCSMRHAHLSREVESRVQIGDTFFEPISWHLATKVLGILCCGLFFGIVGLKIFFSKFQWKIQAELDWRRKHGQAELRDARKHAVEVTLDPETAHPKLCVSDLKTVTHRKAPQEVPHSEKRFTRKSVVASQSFQAGKHYWEVDGGHNKRWRVGVCRDDVDRRKEYVTLSPDHGYWVLRLNGEHLYFTLNPRFISVFPRTPPTKIGVFLDYECGTISFFNINDQSLIYTLTCRFEGLLRPYIEYPSYNEQNGTPIVICPVTQESEKEASWQRASAIPETSNSESSSQATTPFLPRGEM

SEQ ID NO: 503 - DNA, 1969 bp, Homo sapiens
  CDS (95)..(1594)
agcattaggccagttctcctcttctctctaatccatccgtcacctctcctgtcatccgtttccatgccgtgaggtccattcacagaacacatccatggctctcatgctcagtttggttctgagtctcctcaagctgggatcagggcagtggcaggtgtttgggccagacaagcctgtccaggccttggtgggggaggacgcagcattctcctgtttcctgtctcctaagaccaatgcagaggccatggaagtgcggttcttcaggggccagttctctagcgtggtccacctctacagggacgggaaggaccagccatttatgcagatgccacagtatcaaggcaggacaaaactggtgaaggattctattgcggaggggcgcatctctctgaggctggaaaacattactgtgttggatgctggcctctatgggtgcaggattagttcccagtcttactaccagaaggccatctgggagctacaggtgtcagcactgggctcagttcctctcatttccatcacgggatatgttgatagagacatccagctactctgtcagtcctcgggctggttcccccggcccacagcgaagtggaaaggtccacaaggacaggatttgtccacagactccaggacaaacagagacatgcatggcctgtttgatgtggagatctctctgaccgtccaagagaacgccgggagcatatcctgttccatgcggcatgctcatctgagccgagaggtggaatccagggtacagataggagatacctttttcgagcctatatcgtggcacctggctaccaaagtactgggaatactctgctgtggcctattttttggcattgttggactgaagattttcttctccaaattccagtggaaaatccaggcggaactggactggagaagaaagcacggacaggcagaattgagagacgcccggaaacacgcagtggaggtgactctggatccagagacggctcacccgaagctctgcgtttctgatctgaaaactgtaacccatagaaaagctccccaggaggtgcctcactctgagaagagatttacaaggaagagtgtggtggcttctcagagtttccaagcagggaaacattactgggaggtggacggaggacacaataaaaggtggcgcgtgggagtgtgccgggatgatgtggacaggaggaaggagtacgtgactttgtctcccgatcatgggtactgggtcctcagactgaatggagaacatttgtatttcacattaaatccccgttttatcagcgtcttccccaggaccccacctacaaaaataggggtcttcctggactatgagtgtgggaccatctccttcttcaacataaatgaccagtcccttatttataccctgacatgtcggtttgaaggcttattgaggccctacattgagtatccgtcctataatgagcaaaatggaactcccatagtcatctgcccagtcacccaggaatcagagaaagaggcctcttggcaaagggcctctgcaatcccagagacaagcaacagtgagtcctcctcacaggcaaccacgcccttcctccccaggggtgaaatgtaggatgaatcacatcccacattcttctttagggatattaaggtctctctcccagatccaaagtcccgcagcagccggccaaggtggcttccagatgaagggggactggcctgtccacatgggagtcaggtgtcatggctgccctgagctgggagggaagaaggctgacattacatttagtttgctctcactccatctggctaagtgatcttgaaataccacctctcaggtgaagaaccgtcaggaattcccatctcacaggctgtggtgtagattaagtagacaaggaatgtgaataatgcttagatcttattgatgacagagtgtatcctaatggtttgttcattatattacactttcagtaaaaaaaaaaaa

SEQ ID NO: 504 - protein, 500 aa, Homo sapiens; identical to SEQ ID NO: 492

SEQ ID NO: 505 - DNA, 2881 bp, Homo sapiens
  CDS (87)..(2783)
agctggggctccgggctgaggcgctaaagccgccctcccgcccgcggggccccgcgcccggcccgcccgcctgcccgcccgcggccatggccgtccggcccggcctgtggccagcgctcctgggcatagtcctcgccgcttggctccgcggctcgggtgcccagcagagtgccaccgtggccaacccagtgcctggtgccaacccggacctgcttccccacttcctggtggagcccgaggatgtgtacatcgtcaagaacaagccagtgctgcttgtgtgcaaggccgtgcccgccacgcagatcttcttcaagtgcaacggggagtgggtgcgccaggtggaccacgtgatcgagcgcagcacagacgggagcagtggtgagccgaccatggaggtccgcattaatgtctcaaggcagcaggtcgagaaggtgttcgggctggaggaatactggtgccagtgcgtggcatggagctcctcgggcaccaccaagagtcagaaggcctacatccgcatagccagattgcgcaagaacttcgagcaggagccgctggccaaggaggtgtccctggagcagggcatcgtgctgccctgccgtccaccggagggcatccctccagccgaggtggagtggctccggaacgaggacctggtggacccgtccctggaccccaatgtatacatcacgcgggagcacagcctggtggtgcgacaggcccgccttgctgacacggccaactacacctgcgtggccaagaacatcgtggcacgtcgccgcagcgcctccgctgctgtcatcgtctacgtgaacggtgggtggtcgacgtggaccgagtggtccgtctgcagcgccagctgtgggcgcggctggcagaaacggagccggagctgcaccaacccggcgcctctcaacgggggcgctttctgtgaggggcagaatgtccatgaccgcaccgtctcctctctgcttgtctctgtggacggcagctggagcccgtggagcaagtggtcggcctgtgggctggactgcacccactggcggagccgtgagtgctctgacccagcaccccgcaacggaggggaggagtgccagggcactgacctggacacccgcaactgtaccagtgacctctgtgtacacagtgcttctggccctgaggacgtggccctctatgtgggcctcatcgccgtggccgtctgcctggtcctgctgctgcttgtcctcatcctcgtttattgccggaagaaggaggggctggactcagatgtggctgactcgtccattctcacctcaggcttccagcccgtcagcatcaagcccagcaaagcagacaacccccatctgctcaccatccagccggacctcagcaccaccaccacctaccagggcagtctctgtccccggcaggatgggcccagccccaagttccagctcaccaatgggcacctgctcagccccctgggtggcggccgccacacactgcaccacagctctcccacctctgaggccgaggagttcgtctcccgcctctccacccagaactacttccgctccctgccccgaggcaccagcaacatgacctatgggaccttcaacttcctcgggggccggctgatgatccctaatacaggtatcagcctcctcatccccccagatgccataccccgagggaagatctatgagatctacctcacgctgcacaagccggaagacgtgaggttgcccctagctggctgtcagaccctgctgagtcccatcgttagctgtggaccccctggcgtcctgctcacccggccagtcatcctggctatggaccactgtggggagcccagccctgacagctggagcctgcgcctcaaaaagcagtcgtgcgagggcagctgggagcaggatgtgctgcacctgggcgaggaggcgccctcccacctctactactgccagctggaggccagtgcctgctacgtcttcaccgagcagctgggccgctttgccctggtgggagaggccctcagcgtggctgccgccaagcgcctcaagctgcttctgtttgcgccggtggcctgcacctccctcgagtacaacatccgggtctactgcctgcatgacacccacgatgcactcaaggaggtggtgcagctggagaagcagctggggggacagctgatccaggagccacgggtcctgcacttcaaggacagttaccacaacctgcgcctatccatccacgatgtgcccagctccctgtggaagagtaagctccttgtcagctaccaggagatccccttttatcacatctggaatggcacgcagcggtacttgcactgcaccttcaccctggagcgtgtcagccccagcactagtgacctggcctgcaagctgtgggtgtggcaggtggagggcgacgggcagagcttcagcatcaacttcaacatcaccaaggacacaaggtttgctgagctgctggctctggagagtgaagcgggggtcccagccctggtgggccccagtgccttcaagatccccttcctcattcggcagaagataatttccagcctggacccaccctgtaggcggggtgccgactggcggactctggcccagaaactccacctggacagccatctcagcttctttgcctccaagcccagccccacagccatgatcctcaacctgtgggaggcgcggcacttccccaacggcaacctcagccagctggctgcagcagtggctggactgggccagccagacgctggcctcttcacagtgtcggaggctgagtgctgaggccggccaggcccgacacctacactctcaccagctttggcacccaccaaggacaggcagaagccggacaggggcccttccccacaccggggaga

SEQ ID NO: 506 - protein, 899 aa, Homo sapiens
MAVRPGLWPALLGIVLAAWLRGSGAQQSATVANPVPGANPDLLPHFLVEPEDVYIVKNKPVLLVCKAVPATQIFFKCNGEWVRQVDHVIERSTDGSSGEPTMEVRINVSRQQVEKVFGLEEYWCQCVAWSSSGTTKSQKAYIRIARLRKNFEQEPLAKEVSLEQGIVLPCRPPEGIPPAEVEWLRNEDLVDPSLDPNVYITREHSLVVRQARLADTANYTCVAKNIVARRRSASAAVIVYVNGGWSTWTEWSVCSASCGRGWQKRSRSCTNPAPLNGGAFCEGQNVHDRTVSSLLVSVDGSWSPWSKWSACGLDCTHWRSRECSDPAPRNGGEECQGTDLDTRNCTSDLCVHSASGPEDVALYVGLIAVAVCLVLLLLVLILVYCRKKEGLDSDVADSSILTSGFQPVSIKPSKADNPHLLTIQPDLSTTTTYQGSLCPRQDGPSPKFQLTNGHLLSPLGGGRHTLHHSSPTSEAEEFVSRLSTQNYFRSLPRGTSNMTYGTFNFLGGRLMIPNTGISLLIPPDAIPRGKIYEIYLTLHKPEDVRLPLAGCQTLLSPIVSCGPPGVLLTRPVILAMDHCGEPSPDSWSLRLKKQSCEGSWEQDVLHLGEEAPSHLYYCQLEASACYVFTEQLGRFALVGEALSVAAAKRLKLLLFAPVACTSLEYNIRVYCLHDTHDALKEVVQLEKQLGGQLIQEPRVLHFKDSYHNLRLSIHDVPSSLWKSKLLVSYQEIPFYHIWNGTQRYLHCTFTLERVSPSTSDLACKLWVWQVEGDGQSFSINFNITKDTRFAELLALESEAGVPALVGPSAFKIPFLIRQKIISSLDPPCRRGADWRTLAQKLHLDSHLSFFASKPSPTAMILNLWEARHFPNGNLSQLAAAVAGLGQPDAGLFTVSEAEC

SEQ ID NO: 507 - DNA, 993 bp, Homo sapiens
  CDS (1)..(993)
cagcagagtgccaccgtggccaacccagtgcctggtgccaacccggacctgcttccccacttcctggtggagcccgaggatgtgtacatcgtcaagaacaagccagtgctgcttgtgtgcaaggccgtgcccgccacgcagatcttcttcaagtgcaacggggagtgggtgcgccaggtggaccacgtgatcgagcgcagcacagacgggagcagtggtgagccgaccatggaggtccgcattaatgtctcaaggcagcaggtcgagaaggtgttcgggctggaggaatactggtgccagtgcgtggcatggagctcctcgggcaccaccaagagtcagaaggcctacatccgcatagccagattgcgcaagaacttcgagcaggagccgctggccaaggaggtgtccctggagcagggcatcgtgctgccctgccgtccaccggagggcatccctccagccgaggtggagtggctccggaacgaggacctggtggacccgtccctggaccccaatgtatacatcacgcgggagcacagcctggtggtgcgacaggcccgccttgctgacacggccaactacacctgcgtggccaagaacatcgtggcacgtcgccgcagcgcctccgctgctgtcatcgtctacgtgaacggtgggtggtcgacgtggaccgagtggtccgtctgcagcgccagctgtgggcgcggctggcagaaacggagccggagctgcaccaacccggcgcctctcaacgggggcgctttctgtgaggggcagaatgtccatgaccgcaccgtctcctctctgcttgtctctgtggacggcagctggagcccgtggagcaagtggtcggcctgtgggctggactgcacccactggcggagccgtgagtgctctgacccagcaccccgcaacggaggggaggagtgccagggcactgacctggacacccgcaactgtaccagtgacctctgtgtacacagtgcttctggc

SEQ ID NO: 508 - protein, 331 aa, Homo sapiens
QQSATVANPVPGANPDLLPHFLVEPEDVYIVKNKPVLLVCKAVPATQIFFKCNGEWVRQVDHVIERSTDGSSGEPTMEVRINVSRQQVEKVFGLEEYWCQCVAWSSSGTTKSQKAYIRIARLRKNFEQEPLAKEVSLEQGIVLPCRPPEGIPPAEVEWLRNEDLVDPSLDPNVYITREHSLVVRQARLADTANYTCVAKNIVARRRSASAAVIVYVNGGWSTWTEWSVCSASCGRGWQKRSRSCTNPAPLNGGAFCEGQNVHDRTVSSLLVSVDGSWSPWSKWSACGLDCTHWRSRECSDPAPRNGGEECQGTDLDTRNCTSDLCVHSASG

SEQ ID NO: 509 - DNA, 1009 bp, Homo sapiens
  CDS (2)..(1009)
caccggatcccagcagagtgccaccgtggccaacccagtgcctggtgccaacccggacctgcttccccacttcctggtggagcccgaggatgtgtacatcgtcaagaacaagccagtgctgcttgtgtgcaaggccgtgcccgccacgcagatcttcttcaagtgcaacggggagtgggtgcgccaggtggaccacgtgatcgagcgcagcacagacgggagcagtgggctgcccaccatggaggtccgcattaatgtctcaaggcagcaggtcgagaaggtgttcgggctggaggaatactggtgccagtgcgtggcatggagctcctcgggcaccaccaagagtcagaaggcctacatccgcatagcctatttgcgcaagaacttcgagcaggagccactggccaaggaggtgtccctggagcagggcatcgtgctgccctgccgtccaccggagggcatccctccagccgaggtggagtggctccggaacgaggacctggtggacccgtccctggaccccaatgtatacatcacgcgggagcacagcctggtggtgcgacaggcccgccttgctgacacggccaactacacctgcgtggccaagaacatcgtggcacgtcgccgcagcgcctccgctgctgtcatcgtctacgtgaacggtgggtggtcgacgtggaccgagtggtccgtctgcagcgccagctgtgggcgcggctggcagaaacggagccggagctgcaccaacccggcgcctctcaacgggggcgctttctgtgaggggcagaatgtccagaaaacagcctgcgccaccctgtgcccagtggacggcagctggagcccgtggagcaagtggtcggcctgtgggctggactgcacccactggcggagccgtgagtgctctgacccagcaccccgcaacggaggggaggagtgccagggcactgacctggacacccgcaactgtaccagtgacctctgtgtacacagtgcttctggcgaattcggc

SEQ ID NO: 510 - protein, 336 aa, Homo sapiens
TGSQQSATVANPVPGANPDLLPHFLVEPEDVYIVKNKPVLLVCKAVPATQIFFKCNGEWVRQVDHVIERSTDGSSGLPTMEVRINVSRQQVEKVFGLEEYWCQCVAWSSSGTTKSQKAYIRIAYLRKNFEQEPLAKEVSLEQGIVLPCRPPEGIPPAEVEWLRNEDLVDPSLDPNVYITREHSLVVRQARLADTANYTCVAKNIVARRRSASAAVIVYVNGGWSTWTEWSVCSASCGRGWQKRSRSCTNPAPLNGGAFCEGQNVQKTACATLCPVDGSWSPWSKWSACGLDCTHWRSRECSDPAPRNGGEECQGTDLDTRNCTSDLCVHSASGEFG

SEQ ID NO: 511 - DNA, 1009 bp, Homo sapiens
cagcagagtgccaccgtggccaacccagtgcctggtgccaacccggacctgcttccccacttcctggtggagcccgaggatgtgtacatcgtcaagaacaagccagtgctgcttgtgtgcaaggccgtgcccgccacgcagatcttcttcaagtgcaacggggagtgggtgcgccaggtggaccacgtgatcgagcgcagcacagacgggagcagtggtgagccgaccatggaggtccgcattaatgtctcaaggcagcaggtcgagaaggtgttcgggctggaggaatactggtgccagtgcgtggcatggagctcctcgggcaccaccaagagtcagaaggcctacatccgcatagccagattgcgcaagaacttcgagcaggagccgctggccaaggaggtgtccctggagcagggcatcgtgctgccctgccgtccaccggagggcatccctccagccgaggtggagtggctccggaacgaggacctggtggacccgtccctggaccccaatgtatacatcacgcgggagcacagcctggtggtgcgacaggcccgccttgctgacacggccaactacacctgcgtggccaagaacatcgtggcacgtcgccgcagcgcctccgctgctgtcatcgtctacgtgaacggacggcagctggagcccgtggagcaagtggtcggcctgtgggctggactgcacccactggcggagccgtgagtgctctgacccagcaccccgcaacggaggggaggagtgccagggcactgacctggacacccgcaactgtaccagtgacctctgtgtacacagtgcttctggccctgaggacgtggccctctatgtgggcctcatcgccgtggccgtctgcctggtcctgctgctgcttgtcctcatcctcgtttattgccggaagaaggaggggctggactcagatgtggctgactcgtccattctcacctcaggcttccagcccgtcagcatcaagcccagcaaagcagacaac

SEQ ID NO: 512 - protein, 335 aa, Homo sapiens
QQSATVANPVPGANPDLLPHFLVEPEDVYIVKNKPVLLVCKAVPATQIFFKCNGEWVRQVDHVIERSTDGSSGEPTMEVRINVSRQQVEKVFGLEEYWCQCVAWSSSGTTKSQKAYIRIARLRKNFEQEPLAKEVSLEQGIVLPCRPPEGIPPAEVEWLRNEDLVDPSLDPNVYITREHSLVVRQARLADTANYTCVAKNIVARRRSASAAVIVYVDGSWSPWSKWSACGLDCTHWRSRECSDPAPRNGGEECQGTDLDTRNCTSDLCVHSASGPEDVALYVGLIAVAVCLVLLLLVLILVYCRKKEGLDSDVADSSILTSGFQPVSIKPSKADN

SEQ ID NO: 513 - DNA, 2752 bp, Homo sapiens
  CDS (46)..(2739)
ccgcggggccccgcgcccggcccgcccgcctgcccgcccgcggccatggccgtccggcccggcctgtggccagcgctcctgggcatagtcctcgccgcttggctccgcggctcgggtgcccagcagagtgccaccgtggccaacccagtgcctggtgccaacccggacctgcttccccacttcctggtggagcccgaggatgtgtacatcgtcaagaacaagccagtgctgcttgtgtgcaaggccgtgcccgccacgcagatcttcttcaagtgcaacggggagtgggtgcgccaggtggaccacgtgatcgagcgcagcacagacgggagcagtgggctgcccaccatggaggtccgcattaatgtctcaaggcagcaggtcgagaaggtgttcgggctggaggaatactggtgccagtgcgtggcatggagctcctcgggcaccaccaagagtcagaaggcctacatccgcatagccagattgcgcaagaacttcgagcaggagccgctggccaaggaggtgtccctggagcagggcatcgtgctgccctgccgtccaccggagggcatccctccagccgaggtggagtggctccggaacgaggacctggtggacccgtccctggaccccaatgtatacatcacgcgggagcacagcctggtggtgcgacaggcccgccttgctgacacggccaactacacctgcgtggccaagaacatcgtggcacgtcgccgcagcgcctccgctgctgtcatcgtctacgtgaacggtgggtggtcgacgtggaccgagtggtccgtctgcagcgccagctgtgggcgcggctggcagaaacggagccggagctgcaccaacccggcgcctctcaacgggggcgctttctgtgaggggcagaatgtccagaaaacagcctgcgccaccctgtgcccagtagacggcagctggagcccgtggagcaagtggtcggcctgtgggctggactgcacccactggcggagccgtgagtgctctgacccagcaccccgcaacggaggggaggagtgccagggcactgacctggacacccgcaactgtaccagtgacctctgtgtacacagtgcttctggccctgaggacgtggccctctatgtgggcctcatcgccgtggccgtctgcctggtcctgctgctgcttgtcctcatcctcgtttattgccggaagaaggaggggctggactcagatgtggctgactcgtccattctcacctcaggcttccagcccgtcagcatcaagcccagcaaagcagacaacccccatctgctcaccatccagccggacctcagcaccaccaccaccacctaccagggcagtctctgtccccggcaggatgggcccagccccaagttccagctcaccaatgggcacctgctcagccccctgggtggcggccgccacacactgcaccacagctctcccacctctgaggccgaggagttcgtctcccgcctctccacccagaactacttccgctccctgccccgaggcaccagcaacatgacctatgggaccttcaacttcctcgggggccggctgatgatccctaatacaggtatcagcctcctcatccccccagatgccataccccgagggaagatctatgagatctacctcacgctgcacaagccggaagacgtgaggttgcccctagctggctgtcagaccctgctgagtcccatcgttagctgtggaccccctggcgtcctgctcacccggccagtcatcctggctatggaccactgtggggagcccagccctgacagctggagcctgcgcctcaaaaagcagtcgtgcgagggcagctgggaggatgtgctgcacctgggcgaggaggcgccctcccacctctactactgccagctggaggccagtgcctgctacgtcttcaccgagcagctgggccgctttgccctggtgggagaggccctcagcgtggctgccgccaagcgcctcaagctgcttctgtttgcgccggtggcctgcacctccctcgagtacaacatccgggtctactgcctgcatgacacccacgatgcactcaaggaggtggtgcagctggagaagcagctggggggacagctgatccaggagccacgggtcctgcacttcaaggacagttaccacaacctgcgcctatccatccacgatgtgcccagctccctgtggaagagtaagctccttgtcagctaccaggagatccccttttatcacatctggaatggcacgcagcggtacttgcactgcaccttcaccctggagcgtgtcagccccagcactagtgacctggcctgcaagctgtgggtgtggcaggtggagggcgacgggcagagcttcagcatcaacttcaacatcaccaaggacacaaggtttgctgagctgctggctctggagagtgaagcgggggtcccagccctggtgggccccagtgccttcaagatccccttcctcattcggcagaagataatttccagcctggacccaccctgtaggcggggtgccgactggcggactctggcccagaaactccacctggacagccatctcagcttctttgcctccaagcccagccccacagccatgatcctcaacctgtgggaggcgcggcacttccccaacggcaacctcagccagctggctgcagcagtggctggactgggccagccagacgctggcctcttcacagtgtcggaggctgagtgctgaggccggccag

SEQ ID NO: 514 - protein, 898 aa, Homo sapiens
MAVRPGLWPALLGIVLAAWLRGSGAQQSATVANPVPGANPDLLPHFLVEPEDVYIVKNKPVLLVCKAVPATQIFFKCNGEWVRQVDHVIERSTDGSSGLPTMEVRINVSRQQVEKVFGLEEYWCQCVAWSSSGTTKSQKAYIRIARLRKNFEQEPLAKEVSLEQGIVLPCRPPEGIPPAEVEWLRNEDLVDPSLDPNVYITREHSLVVRQARLADTANYTCVAKNIVARRRSASAAVIVYVNGGWSTWTEWSVCSASCGRGWQKRSRSCTNPAPLNGGAFCEGQNVQKTACATLCPVDGSWSPWSKWSACGLDCTHWRSRECSDPAPRNGGEECQGTDLDTRNCTSDLCVHSASGPEDVALYVGLIAVAVCLVLLLLVLILVYCRKKEGLDSDVADSSILTSGFQPVSIKPSKADNPHLLTIQPDLSTTTTTYQGSLCPRQDGPSPKFQLTNGHLLSPLGGGRHTLHHSSPTSEAEEFVSRLSTQNYFRSLPRGTSNMTYGTFNFLGGRLMIPNTGISLLIPPDAIPRGKIYEIYLTLHKPEDVRLPLAGCQTLLSPIVSCGPPGVLLTRPVILAMDHCGEPSPDSWSLRLKKQSCEGSWEDVLHLGEEAPSHLYYCQLEASACYVFTEQLGRFALVGEALSVAAAKRLKLLLFAPVACTSLEYNIRVYCLHDTHDALKEVVQLEKQLGGQLIQEPRVLHFKDSYHNLRLSIHDVPSSLWKSKLLVSYQEIPFYHIWNGTQRYLHCTFTLERVSPSTSDLACKLWVWQVEGDGQSFSINFNITKDTRFAELLALESEAGVPALVGPSAFKIPFLIRQKIISSLDPPCRRGADWRTLAQKLHLDSHLSFFASKPSPTAMILNLWEARHFPNGNLSQLAAAVAGLGQPDAGLFTVSEAEC

SEQ ID NO: 515 - DNA, 1002 bp, Homo sapiens
  CDS (7)..(996)
ggatcccagcagagtgccaccgtggccaacccagtgcctggtgccaacccggacctgcttccccacttcctggtggagcccgaggatgtgtacatcgtcaagaacaagccagtgctgcttgtgtgcaaggccgtgcccgccacgcagatcttcttcaagtgcaacggggagtgggtgcgccaggtggaccacgtgatcgagcgcagcacagacgggagcagtgggctgcccaccatggaggtccgcattaatgtctcaaggcagcaggtcgagaaggtgttcgggctggaggaatactggtgccagtgcgtggcatggagctcctcgggcaccaccaagagtcagaaggcctacatccgcatagcctatttgcgcaagaacttcgagcaggagccactggccaaggaggtgtccctggagcagggcatcgtgctgccctgccgtccaccggagggcatccctccagccgaggtggagtggctccggaacgaggacctggtggacccgtccctggaccccaatgtatacatcacgcgggagcacagcctggtggtgcgacaggcccgccttgctgacacggccaactacacctgcgtggccaagaacatcgtggcacgtcgccgcagcgcctccgctgctgtcatcgtctacgtgaacggtgggtggtcgacgtggaccgagtggtccgtctgcagcgccagctgtgggcgcggctggcagaaacggagccggagctgcaccaacccggcgcctctcaacgggggcgctttctgtgaggggcagaatgtccagaaaacagcctgcgccaccctgtgcccagtggacggcagctggagcccgtggagcaagtggtcggcctgtgggctggactgcacccactggcggagccgtgagtgctctgacccagcaccccgcaacggaggggaggagtgccagggcactgacctggacacccgcaactgtaccagtgacctctgtgtacacagtgcttctggcctcgag

SEQ ID NO: 516 - protein, 330 aa, Homo sapiens
QQSATVANPVPGANPDLLPHFLVEPEDVYIVKNKPVLLVCKAVPATQIFFKCNGEWVRQVDHVIERSTDGSSGLPTMEVRINVSRQQVEKVFGLEEYWCQCVAWSSSGTTKSQKAYIRIAYLRKNFEQEPLAKEVSLEQGIVLPCRPPEGIPPAEVEWLRNEDLVDPSLDPNVYITREHSLVVRQARLADTANYTCVAKNIVARRRSASAAVIVYVNGGWSTWTEWSVCSASCGRGWQKRSRSCTNPAPLNGGAFCEGQNVQKTACATLCPVDGSWSPWSKWSACGLDCTHWRSRECSDPAPRNGGEECQGTDLDTRNCTSDLCVHSASG

SEQ ID NO: 517 - DNA, 2575 bp, Homo sapiens
  CDS (3)..(2501)
cagcgctcctgggcatagtcctcgccgcttggctccgcggctcgggtgcccagcagagtgccaccgtggccaacccagtgcctggtgccaacccggacctgcttccccacttcctggtggagcccgaggatgtgtacatcgtcaagaacaagccagtgctgcttgtgtgcaaggccgtgcccgccacgcagatcttcttcaagtgcaacggggagtgggtgcgccaggtggaccacgtgatcgagcgcagcacagacgggagcagtgggctgcccaccatggaggtccgcattaatgtctcaaggcagcaggtcgagaaggtgttcgggctggaggaatactggtgccagtgcgtggcatggagctcctcgggcaccaccaagagtcagaaggcctacatccgcatagcctatttgcgcaagaacttcgagcaggagccgctggccaaggaggtgtccctggagcagggcatcgtgctgccctgccgtccaccggagggcatccctccagccgaggtggagtggctccggaacgaggacctggtggacccgtccctggaccccaatgtatacatcacgcgggagcacagcctggtggtgcgacaggcccgccttgctgacacggccaactacacctgcgtggccaagaacatcgtggcacgtcgccgcagcgcctccgctgctgtcatcgtctacgtggacggcagctggagcccgtggagcaagtggtcggcctgtgggctggactgcacccactggcggagccgtgagtgctctgacccagcaccccgcaacggaggggaggagtgccagggcactgacctggacacccgcaactgtaccagtgacctctgtgtacacactgcttctggccctgaggacgtggccctctatgtgggcctcatcgccgtggccgtctgcctggtcctgctgctgcttgtcctcatcctcgtttattgccggaagaaggaggggctggactcagatgtggctgactcgtccattctcacctcaggcttccagcccgtcagcatcaagcccagcaaagcagacaacccccatctgctcaccatccagccggacctcagcaccaccaccaccacctaccagggcagtctctgtccccggcaggatgggcccagccccaagttccagctcaccaatgggcacctgctcagccccctgggtggcggccgccacacactgcaccacagctctcccacctctgaggccgaggagttcgtctcccgcctctccacccagaactacttccgctccctgccccgaggcaccagcaacatgacctatgggaccttcaacttcctcgggggccggctgatgatccctaatacaggaatcagcctcctcatccccccagatgccataccccgagggaagatctatgagatctacctcacgctgcacaagccggaagacgtgaggttgcccctagctggctgtcagaccctgctgagtcccatcgttagctgtggaccccctggcgtcctgctcacccggccagtcatcctggctatggaccactgtggggagcccagccctgacagctggagcctgcgcctcaaaaagcagtcgtgcgagggcagctgggaggatgtgctgcacctgggcgaggaggcgccctcccacctctactactgccagctggaggccagtgcctgctacgtcttcaccgagcagctgggccgctttgccctggtgggagaggccctcagcgtggctgccgccaagcgcctcaagctgcttctgtttgcgccggtggcctgcacctccctcgagtacaacatccgggtctactgcctgcatgacacccacgatgcactcaaggaggtggtgcagctggagaagcagctggggggacagctgatccaggagccacgggtcctgcacttcaaggacagttaccacaacctgcgcctatccatccacgatgtgcccagctccctgtggaagagtaagctccttgtcagctaccaggagatccccttttatcacatctggaatggcacgcagcggtacttgcactgcaccttcaccctggagcgtgtcagccccagcactagtgacctggcctgcaagctgtgggtgtggcaggtggagggcgacgggcagagcttcagcatcaacttcaacatcaccaaggacacaaggtttgctgagctgctggctctggagagtgaagcgggggtcccagccctggtgggccccagtgccttcaagatccccttcctcattcggcagaagataatttccagcctggacccaccctgtaggcggggtgccgactggcggactctggcccagaaactccacctggacagccatctcagcttctttgcctccaagcccagccccacagccatgatcctcaacctgtgggaggcgcggcacttccccaacggcaacctcagccagctggctgcagcagtggctggactgggccagccagacgctggcctcttcacagtgtcggaggctgagtgctgaggccggccaggcccgacacctacactctcaccagctttggcacccaccaaggacaggcagaagccggacag

SEQ ID NO: 518 - protein, 833 aa, Homo sapiens
ALLGIVLAAWLRGSGAQQSATVANPVPGANPDLLPHFLVEPEDVYIVKNKPVLLVCKAVPATQIFFKCNGEWVRQVDHVIERSTDGSSGLPTMEVRINVSRQQVEKVFGLEEYWCQCVAWSSSGTTKSQKAYIRIAYLRKNFEQEPLAKEVSLEQGIVLPCRPPEGIPPAEVEWLRNEDLVDPSLDPNVYITREHSLVVRQARLADTANYTCVAKNIVARRRSASAAVIVYVDGSWSPWSKWSACGLDCTHWRSRECSDPAPRNGGEECQGTDLDTRNCTSDLCVHTASGPEDVALYVGLIAVAVCLVLLLLVLILVYCRKKEGLDSDVADSSILTSGFQPVSIKPSKADNPHLLTIQPDLSTTTTTYQGSLCPRQDGPSPKFQLTNGHLLSPLGGGRHTLHHSSPTSEAEEFVSRLSTQNYFRSLPRGTSNMTYGTFNFLGGRLMIPNTGISLLIPPDAIPRGKIYEIYLTLHKPEDVRLPLAGCQTLLSPIVSCGPPGVLLTRPVILAMDHCGEPSPDSWSLRLKKQSCEGSWEDVLHLGEEAPSHLYYCQLEASACYVFTEQLGRFALVGEALSVAAAKRLKLLLFAPVACTSLEYNIRVYCLHDTHDALKEVVQLEKQLGGQLIQEPRVLHFKDSYHNLRLSIHDVPSSLWKSKLLVSYQEIPFYHIWNGTQRYLHCTFTLERVSPSTSDLACKLWVWQVEGDGQSFSINFNITKDTRFAELLALESEAGVPALVGPSAFKIPFLIRQKIISSLDPPCRRGADWRTLAQKLHLDSHLSFFASKPSPTAMILNLWEARHFPNGNLSQLAAAVAGLGQPDAGLFTVSEAEC

SEQ ID NO: 519 - DNA, 2463 bp, Homo sapiens
  CDS (7)..(2457)
ggatcccagcagagtgccaccgtggccaacccagtgcctggtgccaacccggacctgcttccccacttcctggtggagcccgaggatgtgtacatcgtcaagaacaagccagtgctgcttgtgtgcaaggccgtgcccgccacgcagatcttcttcaagtgcaacggggagtgggtgcgccaggtggaccacgtgatcgagcgcagcacagacgggagcagtgggctgcccaccatggaggtccgcattaatgtctcaaggcagcaggtcgagaaggtgttcgggctggaggaatactggtgccagtgcgtggcatggagctcctcgggcaccaccaagagtcagaaggcctacatccgcatagcctatttgcgcaagaacttcgagcaggagccgctggccaaggaggtgtccctggagcagggcatcgtgctgccctgccgtccaccggagggcatccctccagccgaggtggagtggctccggaacgaggacctggtggacccgtccctggaccccaatgtatacatcacgcgggagcacagcctggtggtgcgacaggcccgccttgctgacacggccaactacacctgcgtggccaagaacatcgtggcacgtcgccgcagcgcctccgctgctgtcatcgtctacgtggacggcagctggagcccgtggagcaagtggtcggcctgtgggctgggctgcacccactggcggagccgtgagtgctctgacccagcaccccgcaacggaggggaggagtgccagggcactgacctggacacccgcaactgtaccagtgacctctgtgtacacactgcttctggccctgaggacgtggccctctatgtgggcctcatcgccgtggccgtctgcctggtcctgctgctgcttgtcctcatcctcgtttattgccggaagaaggaggggctggactcagatgtggctgactcgtccattctcacctcaggcttccagcccgtcagcatcaagcccagcaaagcagacaacccccatctgctcaccatccagccggacctcagcaccaccaccaccacctaccagggcagtctctgtccccggcaggatgggcccagccccaagttccagctcaccaatgggcacctgctcagccccctgggtggcggccgccacacactgcaccacagctctcccacctctgaggccgaggagttcgtctcccgcctctccacccagaactacttccgctccctgccccgaggcaccagcaacatgacctatgggaccttcaacttcctcgggggccggctgatgatccctaatacaggaatcagcctcctcatccccccagatgccataccccgagggaagatctatgagatctacctcacgctgcacaagccggaagacgtgaggttgcccctagctggctgtcagaccctgctgagtcccatcgttagctgtggaccccctggcgtcctgctcacccggccagtcatcctggctatggaccactgtggggagcccagccctgacagctggagcctgcgcctcaaaaagcagtcgtgcgagggcagctgggaggatgtgctgcacctgggcgaggaggcgccctcccacctctactactgccagctggaggccagtgcctgctacgtcttcaccgagcagctgggccgctttgccctggtgggagaggccctcagcgtggctgccgccaagcgcctcaagctgcttctgtttgcgccggtggcctgcacctccctcgagtacaacatccgggtctactgcctgcatgacacccacgatgcactcaaggaggtggtgcagctggagaagcagctggggggacagctgatccaggagccacgggtcctgcacttcaaggacagttaccacaacctgcgcctatccatccacgatgtgcccagctccctgtggaagagtaagctccttgtcagctaccaggagatccccttttatcacatctggaatggcacgcagcggtacttgcactgcaccttcaccctggagcgtgtcagccccagcactagtgacctggcctgcaagctgtgggtgtggcaggtggagggcgacgggcagagcttcagcatcaacttcaacatcaccaaggacacaaggtttgctgagctgctggctctggagagtgaagcgggggtcccagccctggtgggccccagtgccttcaagatccccttcctcattcggcagaagataatttccagcctggacccaccctgtaggcggggtgccgactggcggactctggcccagaaactccacctggacagccatctcagcttctttgcctccaagcccagccccacagccatgatcctcaacctgtgggaggcgcggcacttccccaacggcaacctcagccagctggctgcagcagtggctggactgggccagccagacgctggcctcttcacagtgtcggaggctgagtgcaagctt

SEQ ID NO: 520 - protein, 817 aa, Homo sapiens
QQSATVANPVPGANPDLLPHFLVEPEDVYIVKNKPVLLVCKAVPATQIFFKCNGEWVRQVDHVIERSTDGSSGLPTMEVRINVSRQQVEKVFGLEEYWCQCVAWSSSGTTKSQKAYIRIAYLRKNFEQEPLAKEVSLEQGIVLPCRPPEGIPPAEVEWLRNEDLVDPSLDPNVYITREHSLVVRQARLADTANYTCVAKNIVARRRSASAAVIVYVDGSWSPWSKWSACGLGCTHWRSRECSDPAPRNGGEECQGTDLDTRNCTSDLCVHTASGPEDVALYVGLIAVAVCLVLLLLVLILVYCRKKEGLDSDVADSSILTSGFQPVSIKPSKADNPHLLTIQPDLSTTTTTYQGSLCPRQDGPSPKFQLTNGHLLSPLGGGRHTLHHSSPTSEAEEFVSRLSTQNYFRSLPRGTSNMTYGTFNFLGGRLMIPNTGISLLIPPDAIPRGKIYEIYLTLHKPEDVRLPLAGCQTLLSPIVSCGPPGVLLTRPVILAMDHCGEPSPDSWSLRLKKQSCEGSWEDVLHLGEEAPSHLYYCQLEASACYVFTEQLGRFALVGEALSVAAAKRLKLLLFAPVACTSLEYNIRVYCLHDTHDALKEVVQLEKQLGGQLIQEPRVLHFKDSYHNLRLSIHDVPSSLWKSKLLVSYQEIPFYHIWNGTQRYLHCTFTLERVSPSTSDLACKLWVWQVEGDGQSFSINFNITKDTRFAELLALESEAGVPALVGPSAFKIPFLIRQKIISSLDPPCRRGADWRTLAQKLHLDSHLSFFASKPSPTAMILNLWEARHFPNGNLSQLAAAVAGLGQPDAGLFTVSEAEC

SEQ ID NO: 521 - DNA, 2881 bp, Homo sapiens
agctggggctccgggctgaggcgctaaagccgccctcccgcccgcggggccccgcgcccggcccgcccgcctgcccgcccgcggccatggccgtccggcccggcctgtggccagcgctcctgggcatagtcctcgccgcttggctccgcggctcgggtgcccagcagagtgccaccgtggccaacccagtgcctggtgccaacccggacctgcttccccacttcctggtggagcccgaggatgtgtacatcgtcaagaacaagccagtgctgcttgtgtgcaaggccgtgcccgccacgcagatcttcttcaagtgcaacggggagtgggtgcgccaggtggaccacgtgatcgagcgcagcacagacgggagcagtggtgagccgaccatggaggtccgcattaatgtctcaaggcagtaggtcgagaaggtgttcgggctggaggaatactggtgccagtgcgtggcatggagctcctcgggcaccaccaagagtcagaaggcctacatccgcatagccagattgcgcaagaacttcgagcaggagccgctggccaaggaggtgtccctggagcagggcatcgtgctgccctgccgtccaccggagggcatccctccagccgaggtggagtggctccggaacgaggacctggtggacccgtccctggaccccaatgtatacatcacgcgggagcacagcctggtggtgcgacaggcccgccttgctgacacggccaactacacctgcgtggccaagaacatcgtggcacgtcgccgcagcgcctccgctgctgtcatcgtctacgtgaacggtgggtggtcgacgtggaccgagtggtccgtctgcagcgccagctgtgggcgcggctggcagaaacggagccggagctgcaccaacccggcgcctctcaacgggggcgctttctgtgaggggcagaatgtccatgaccgcaccgtctcctctctgcttgtctctgtggacggcagctggagcccgtggagcaagtggtcggcctgtgggctggactgcacccactggcggagccgtgagtgctctgacccagcaccccgcaacggaggggaggagtgccagggcactgacctggacacccgcaactgtaccagtgacctctgtgtacacagtgcttctggccctgaggacgtggccctctatgtgggcctcatcgccgtggccgtctgcctggtcctgctgctgcttgtcctcatcctcgtttattgccggaagaaggaggggctggactcagatgtggctgactcgtccattctcacctcaggcttccagcccgtcagcatcaagcccagcaaagcagacaacccccatctgctcaccatccagccggacctcagcaccaccaccacctaccagggcagtctctgtccccggcaggatgggcccagccccaagttccagctcaccaatgggcacctgctcagccccctgggtggcggccgccacacactgcaccacagctctcccacctctgaggccgaggagttcgtctcccgcctctccacccagaactacttccgctccctgccccgaggcaccagcaacatgacctatgggaccttcaacttcctcgggggccggctgatgatccctaatacaggtatcagcctcctcatccccccagatgccataccccgagggaagatctatgagatctacctcacgctgcacaagccggaagacgtgaggttgcccctagctggctgtcagaccctgctgagtcccatcgttagctgtggaccccctggcgtcctgctcacccggccagtcatcctggctatggaccactgtggggagcccagccctgacagctggagcctgcgcctcaaaaagcagtcgtgcgagggcagctgggagcaggatgtgctgcacctgggcgaggaggcgccctcccacctctactactgccagctggaggccagtgcctgctacgtcttcaccgagcagctgggccgctttgccctggtgggagaggccctcagcgtggctgccgccaagcgcctcaagctgcttctgtttgcgccggtggcctgcacctccctcgagtacaacatccgggtctactgcctgcatgacacccacgatgcactcaaggaggtggtgcagctggagaagcagctggggggacagctgatccaggagccacgggtcctgcacttcaaggacagttaccacaacctgcgcctatccatccacgatgtgcccagctccctgtggaagagtaagctccttgtcagctaccaggagatccccttttatcacatctggaatggcacgcagcggtacttgcactgcaccttcaccctggagcgtgtcagccccagcactagtgacctggcctgcaagctgtgggtgtggcaggtggagggcgacgggcagagcttcagcatcaacttcaacatcaccaaggacacaaggtttgctgagctgctggctctggagagtgaagcgggggtcccagccctggtgggccccagtgccttcaagatccccttcctcattcggcagaagataatttccagcctggacccaccctgtaggcggggtgccgactggcggactctggcccagaaactccacctggacagccatctcagcttctttgcctccaagcccagccccacagccatgatcctcaacctgtgggaggcgcggcacttccccaacggcaacctcagccagctggctgcagcagtggctggactgggccagccagacgctggcctcttcacagtgtcggaggctgagtgctgaggccggccaggcccgacacctacactctcaccagctttggcacccaccaaggacaggcagaagccggacaggggcccttccccacaccggggaga

SEQ ID NO: 522 - protein, 898 aa, Homo sapiens
MAVRPGLWPALLGIVLAAWLRGSGAQQSATVANPVPGANPDLLPHFLVEPEDVYIVKNKPVLLVCKAVPATQIFFKCNGEWVRQVDHVIERSTDGSSGEPTMEVRINVSRQVEKVFGLEEYWCQCVAWSSSGTTKSQKAYIRIARLRKNFEQEPLAKEVSLEQGIVLPCRPPEGIPPAEVEWLRNEDLVDPSLDPNVYITREHSLVVRQARLADTANYTCVAKNIVARRRSASAAVIVYVNGGWSTWTEWSVCSASCGRGWQKRSRSCTNPAPLNGGAFCEGQNVHDRTVSSLLVSVDGSWSPWSKWSACGLDCTHWRSRECSDPAPRNGGEECQGTDLDTRNCTSDLCVHSASGPEDVALYVGLIAVAVCLVLLLLVLILVYCRKKEGLDSDVADSSILTSGFQPVSIKPSKADNPHLLTIQPDLSTTTTYQGSLCPRQDGPSPKFQLTNGHLLSPLGGGRHTLHHSSPTSEAEEFVSRLSTQNYFRSLPRGTSNMTYGTFNFLGGRLMIPNTGISLLIPPDAIPRGKIYEIYLTLHKPEDVRLPLAGCQTLLSPIVSCGPPGVLLTRPVILAMDHCGEPSPDSWSLRLKKQSCEGSWEQDVLHLGEEAPSHLYYCQLEASACYVFTEQLGRFALVGEALSVAAAKRLKLLLFAPVACTSLEYNIRVYCLHDTHDALKEVVQLEKQLGGQLIQEPRVLHFKDSYHNLRLSIHDVPSSLWKSKLLVSYQEIPFYHIWNGTQRYLHCTFTLERVSPSTSDLACKLWVWQVEGDGQSFSINFNITKDTRFAELLALESEAGVPALVGPSAFKIPFLIRQKIISSLDPPCRRGADWRTLAQKLHLDSHLSFFASKPSPTAMILNLWEARHFPNGNLSQLAAAVAGLGQPDAGLFTVSEAEC

SEQ ID NO: 523 - DNA, 2881 bp, Homo sapiens
  CDS (87)..(2783)
agctggggctccgggctgaggcgctaaagccgccctcccgcccgcggggccccgcgcccggcccgcccgcctgcccgcccgcggccatggccgtccggcccggcctgtggccagcgctcctgggcatagtcctcgccgcttggctccgcggctcgggtgcccagcagagtgccaccgtggccaacccagtgcctggtgccaacccggacctgcttccccacttcctggtggagcccgaggatgtgtacatcgtcaagaacaagccagtgctgcttgtgtgcaaggccgtgcccgccacgcagatcttcttcaagtgcaacggggagtgggtgcgccaggtggaccacgtgatcgagcgcagcacagacgggagcagtggtgagccgaccatggaggtccgcattaatgtctcaaggcagcaggtcgagaaggtgttcgggctggaggaatactggtgccagtgcgtggcatggagctcctcgggcaccaccaagagtcagaaggcctacatccgcatagccagattgcgcaagaacttcgagcaggagccgctggccaaggaggtgtccctggagcagggcatcgtgctgccctgccgtccaccggagggcatccctccagccgaggtggagtggctccggaacgaggacctggtggacccgtccctggaccccaatgtatacatcacgcgggagcacagcctggtggtgcgacaggcccgccttgctgacacggccaactacacctgcgtggccaagaacatcgtggcacgtcgccgcagcgcctccgctgctgtcatcgtctacgtgaacggtgggtggtcgacgtggaccgagtggtccgtctgcagcgccagctgtgggcgcggctggcagaaacggagccggagctgcaccaacccggcgcctctcaacgggggcgctttctgtgaggggcagaatgtccatgaccgcaccgtctcctctctgcttgtctctgtggacggcagctggagcccgtggagcaagtggtcggcctgtgggctggactgcacccactggcggagccgtgagtgctctgacccagcaccccgcaacggaggggaggagtgccagggcactgacctggacacccgcaactgtaccagtgacctctgtgtgcacagtgcttctggccctgaggacgtggccctctatgtgggcctcatcgccgtggccgtctgcctggtcctgctgctgcttgtcctcatcctcgtttattgccggaagaaggaggggctggactcagatgtggctgactcgtccattctcacctcaggcttccagcccgtcagcatcaagcccagcaaagcagacaacccccatctgctcaccatccagccggacctcagcaccaccaccacctaccagggcagtctctgtccccggcaggatgggcccagccccaagttccagctcaccaatgggcacctgctcagccccctgggtggcggccgccacacactgcaccacagctctcccacctctgaggccgaggagttcgtctcccgcctctccacccagaactacttccgctccctgccccgaggcaccagcaacatgacctatgggaccttcaacttcctcgggggccggctgatgatccctaatacaggtatcagcctcctcatccccccagatgccataccccgagggaagatctatgagatctacctcacgctgcacaagccggaagacgtgaggttgcccctagctggctgtcagaccctgctgagtcccatcgttagctgtggaccccctggcgtcctgctcacccggccagtcatcctggctatggaccactgtggggagcccagccctgacagctggagcctgcgcctcaaaaagcagtcgtgcgagggcagctgggagcaggatgtgctgcacctgggcgaggaggcgccctcccacctctactactgccagctggaggccagtgcctgctacgtcttcaccgagcagctgggccgctttgccctggtgggagaggccctcagcgtggctgccgccaagcgcctcaagctgcttctgtttgcgccggtggcctgcacctccctcgagtacaacatccgggtctactgcctgcatgacacccacgatgcactcaaggaggtggtgcagctggagaagcagctggggggacagctgatccaggagccacgggtcctgcacttcaaggacagttaccacaacctgcgcctatccatccacgatgtgcccagctccctgtggaagagtaagctccttgtcagctaccaggagatccccttttatcacatctggaatggcacgcagcggtacttgcactgcaccttcaccctggagcgtgtcagccccagcactagtgacctggcctgcaagctgtgggtgtggcaggtggagggcgacgggcagagcttcagcatcaacttcaacatcaccaaggacacaaggtttgctgagctgctggctctggagagtgaagcgggggtcccagccctggtgggccccagtgccttcaagatccccttcctcattcggcagaagataatttccagcctggacccaccctgtaggcggggtgccgactggcggactctggcccagaaactccacctggacagccatctcagcttctttgcctccaagcccagccccacagccatgatcctcaacctgtgggaggcgcggcacttccccaacggcaacctcagccagctggctgcagcagtggctggactgggccagccagacgctggcctcttcacagtgtcggaggctgagtgctgaggccggccaggcccgacacctacactctcaccagctttggcacccaccaaggacaggcagaagccggacaggggcccttccccacaccggggaga

SEQ ID NO: 524 - protein, 899 aa, Homo sapiens; identical to SEQ ID NO: 506

SEQ ID NO: 525 - DNA, 2881 bp, Homo sapiens
  CDS (87)..(2783)
agctggggctccgggctgaggcgctaaagccgccctcccgcccgcggggccccgcgcccggcccgcccgcctgcccgcccgcggccatggccgtccggcccggcctgtggccagcgctcctgggcatagtcctcgccgcttggctccgcggctcgggtgcccagcagagtgccaccgtggccaacccagtgcctggtgccaacccggacctgcttccccacttcctggtggagcccgaggatgtgtacatcgtcaagaacaagccagtgctgcttgtgtgcaaggccgtgcccgccacgcagatcttcttcaagtgcaacggggagtgggtgcgccaggtggaccacgtgatcgagcgcagcacagacgggagcagtggtgagccgaccatggaggtccgcattaatgtctcaaggcagcaggtcgagaaggtgttcgggctggaggaatactggtgccagtgcgtggcatggagctcctcgggcaccaccaagagtcagaaggcctacatccgcatagccagattgcgcaagaacttcgagcaggagccgctggccaaggaggtgtccctggagcagggcatcgtgctgccctgccgtccaccggagggcatccctccagccgaggtggagtggctccggaacgaggacctggtggacccgtccctggaccccaatgtatacatcacgcgggagcacagcctggtggtgcgacaggcccgccttgctgacacggccaactacacctgcgtggccaagaacatcgtggcacgtcgccgcagcgcctccgctgctgtcatcgtctacgtgaacggtgggtggtcgacgtggaccgagtggtccgtctgcagcgccagctgtgggcgcggctggcagaaacggagccggagctgcaccaacccggcgcctctcaacgggggcgctttctgtgaggggcagaatgtccatgaccgcaccgtctcctctctgcttgtctctgtggacggcagctggagcccgtggagcaagtggtcggcctgtgggctggactgcacccactggcggagccgtgagtgctctgacccagcaccccgcaacggaggggaggagtgccagggcactgacctggacacccgcaactgtaccagtgacctctgtgtacacagtgcttctggccctgaggacgtggccctctatgtgggcctcatcgccgtggccgtctgcctggtcctgctgctgcttgtccccatcctcgtttattgccggaagaaggaggggctggactcagatgtggctgactcgtccattctcacctcaggcttccagcccgtcagcatcaagcccagcaaagcagacaacccccatctgctcaccatccagccggacctcagcaccaccaccacctaccagggcagtctctgtccccggcaggatgggcccagccccaagttccagctcaccaatgggcacctgctcagccccctgggtggcggccgccacacactgcaccacagctctcccacctctgaggccgaggagttcgtctcccgcctctccacccagaactacttccgctccctgccccgaggcaccagcaacatgacctatgggaccttcaacttcctcgggggccggctgatgatccctaatacaggtatcagcctcctcatccccccagatgccataccccgagggaagatctatgagatctacctcacgctgcacaagccggaagacgtgaggttgcccctagctggctgtcagaccctgctgagtcccatcgttagctgtggaccccctggcgtcctgctcacccggccagtcatcctggctatggaccactgtggggagcccagccctgacagctggagcctgcgcctcaaaaagcagtcgtgcgagggcagctgggagcaggatgtgctgcacctgggcgaggaggcgccctcccacctctactactgccagctggaggccagtgcctgctacgtcttcaccgagcagctgggccgctttgccctggtgggagaggccctcagcgtggctgccgccaagcgcctcaagctgcttctgtttgcgccggtggcctgcacctccctcgagtacaacatccgggtctactgcctgcatgacacccacgatgcactcaaggaggtggtgcagctggagaagcagctggggggacagctgatccaggagccacgggtcctgcacttcaaggacagttaccacaacctgcgcctatccatccacgatgtgcccagctccctgtggaagagtaagctccttgtcagctaccaggagatccccttttatcacatctggaatggcacgcagcggtacttgcactgcaccttcaccctggagcgtgtcagccccagcactagtgacctggcctgcaagctgtgggtgtggcaggtggagggcgacgggcagagcttcagcatcaacttcaacatcaccaaggacacaaggtttgctgagctgctggctctggagagtgaagcgggggtcccagccctggtgggccccagtgccttcaagatccccttcctcattcggcagaagataatttccagcctggacccaccctgtaggcggggtgccgactggcggactctggcccagaaactccacctggacagccatctcagcttctttgcctccaagcccagccccacagccatgatcctcaacctgtgggaggcgcggcacttccccaacggcaacctcagccagctggctgcagcagtggctggactgggccagccagacgctggcctcttcacagtgtcggaggctgagtgctgaggccggccaggcccgacacctacactctcaccagctttggcacccaccaaggacaggcagaagccggacaggggcccttccccacaccggggaga

SEQ ID NO: 526 - protein, 899 aa, Homo sapiens
MAVRPGLWPALLGIVLAAWLRGSGAQQSATVANPVPGANPDLLPHFLVEPEDVYIVKNKPVLLVCKAVPATQIFFKCNGEWVRQVDHVIERSTDGSSGEPTMEVRINVSRQQVEKVFGLEEYWCQCVAWSSSGTTKSQKAYIRIARLRKNFEQEPLAKEVSLEQGIVLPCRPPEGIPPAEVEWLRNEDLVDPSLDPNVYITREHSLVVRQARLADTANYTCVAKNIVARRRSASAAVIVYVNGGWSTWTEWSVCSASCGRGWQKRSRSCTNPAPLNGGAFCEGQNVHDRTVSSLLVSVDGSWSPWSKWSACGLDCTHWRSRECSDPAPRNGGEECQGTDLDTRNCTSDLCVHSASGPEDVALYVGLIAVAVCLVLLLLVPILVYCRKKEGLDSDVADSSILTSGFQPVSIKPSKADNPHLLTIQPDLSTTTTYQGSLCPRQDGPSPKFQLTNGHLLSPLGGGRHTLHHSSPTSEAEEFVSRLSTQNYFRSLPRGTSNMTYGTFNFLGGRLMIPNTGISLLIPPDAIPRGKIYEIYLTLHKPEDVRLPLAGCQTLLSPIVSCGPPGVLLTRPVILAMDHCGEPSPDSWSLRLKKQSCEGSWEQDVLHLGEEAPSHLYYCQLEASACYVFTEQLGRFALVGEALSVAAAKRLKLLLFAPVACTSLEYNIRVYCLHDTHDALKEVVQLEKQLGGQLIQEPRVLHFKDSYHNLRLSIHDVPSSLWKSKLLVSYQEIPFYHIWNGTQRYLHCTFTLERVSPSTSDLACKLWVWQVEGDGQSFSINFNITKDTRFAELLALESEAGVPALVGPSAFKIPFLIRQKIISSLDPPCRRGADWRTLAQKLHLDSHLSFFASKPSPTAMILNLWEARHFPNGNLSQLAAAVAGLGQPDAGLFTVSEAEC

SEQ ID NO: 527 - DNA, 2881 bp, Homo sapiens
  CDS (87)..(2783)
agctggggctccgggctgaggcgctaaagccgccctcccgcccgcggggccccgcgcccggcccgcccgcctgcccgcccgcggccatggccgtccggcccggcctgtggccagcgctcctgggcatagtcctcgccgcttggctccgcggctcgggtgcccagcagagtgccaccgtggccaacccagtgcctggtgccaacccggacctgcttccccacttcctggtggagcccgaggatgtgtacatcgtcaagaacaagccagtgctgcttgtgtgcaaggccgtgcccgccacgcagatcttcttcaagtgcaacggggagtgggtgcgccaggtggaccacgtgatcgagcgcagcacagacgggagcagtggtgagccgaccatggaggtccgcattaatgtctcaaggcagcaggtcgagaaggtgttcgggctggaggaatactggtgccagtgcgtggcatggagctcctcgggcaccaccaagagtcagaaggcctacatccgcatagccagattgcgcaagaacttcgagcaggagccgctggccaaggaggtgtccctggagcagggcatcgtgctgccctgccgtccaccggagggcatccctccagccgaggtggagtggctccggaacgaggacctggtggacccgtccctggaccccaatgtatacatcacgcgggagcacagcctggtggtgcgacaggcccgccttgctgacacggccaactacacctgcgtggccaagaacatcgtggcacgtcgccgcagcgcctccgctgctgtcatcgtctacgtgaacggtgggtggtcgacgtggaccgagtggtccgtctgcagcgccagctgtgggcgcggctggcagaaacggagccggagctgcaccaacccggcgcctctcaacgggggcgctttctgtgaggggcagaatgtccatgaccgcaccgtctcctctctgcttgtctctgtggacggcagctggagcccgtggagcaagtggtcggcctgtgggctggactgcacccactggcggagccgtgagtgctctgacccagcaccccgcaacggaggggaggagtgccagggcactgacctggacacccgcaactgtaccagtgacctctgtgtacacagtgcttctggccctgaggacgtggccctctatgtgggcctcatcgccgtggccgtctgcctggtcctgctgctgcttgtcctcatcctcgtttattgccggaagaaggaggggctggactcagatgtggctgactcgtccattctcacctcaggcttccagcccgtcagcatcaagcccagcaaagcagacaacccccatctgctcaccatccagccggacctcagcaccaccaccacctaccagggcagtctctgtccccggcaggatgggcccagccccaagttccagctcaccaatgggcacctgctcagccccctgggtggcggccgccacacactgcaccacagctctcccacctctgaggccgaggagttcgtctcccgcctctccacccagaactacttccgctccctgccccgaggcaccagcaacatgacctatgggaccttcaacttcctcgggggccggctgatgatccctaatacaggtatcagcctcctcatccccccagatgtcataccccgagggaagatctatgagatctacctcacgctgcacaagccggaagacgtgaggttgcccctagctggctgtcagaccctgctgagtcccatcgttagctgtggaccccctggcgtcctgctcacccggccagtcatcctggctatggaccactgtggggagcccagccctgacagctggagcctgcgcctcaaaaagcagtcgtgcgagggcagctgggagcaggatgtgctgcacctgggcgaggaggcgccctcccacctctactactgccagctggaggccagtgcctgctacgtcttcaccgagcagctgggccgctttgccctggtgggagaggccctcagcgtggctgccgccaagcgcctcaagctgcttctgtttgcgccggtggcctgcacctccctcgagtacaacatccgggtctactgcctgcatgacacccacgatgcactcaaggaggtggtgcagctggagaagcagctggggggacagctgatccaggagccacgggtcctgcacttcaaggacagttaccacaacctgcgcctatccatccacgatgtgcccagctccctgtggaagagtaagctccttgtcagctaccaggagatccccttttatcacatctggaatggcacgcagcggtacttgcactgcaccttcaccctggagcgtgtcagccccagcactagtgacctggcctgcaagctgtgggtgtggcaggtggagggcgacgggcagagcttcagcatcaacttcaacatcaccaaggacacaaggtttgctgagctgctggctctggagagtgaagcgggggtcccagccctggtgggccccagtgccttcaagatccccttcctcattcggcagaagataatttccagcctggacccaccctgtaggcggggtgccgactggcggactctggcccagaaactccacctggacagccatctcagcttctttgcctccaagcccagccccacagccatgatcctcaacctgtgggaggcgcggcacttccccaacggcaacctcagccagctggctgcagcagtggctggactgggccagccagacgctggcctcttcacagtgtcggaggctgagtgctgaggccggccaggcccgacacctacactctcaccagctttggcacccaccaaggacaggcagaagccggacaggggcccttccccacaccggggaga

SEQ ID NO: 528 - protein, 899 aa, Homo sapiens
MAVRPGLWPALLGIVLAAWLRGSGAQQSATVANPVPGANPDLLPHFLVEPEDVYIVKNKPVLLVCKAVPATQIFFKCNGEWVRQVDHVIERSTDGSSGEPTMEVRINVSRQQVEKVFGLEEYWCQCVAWSSSGTTKSQKAYIRIARLRKNFEQEPLAKEVSLEQGIVLPCRPPEGIPPAEVEWLRNEDLVDPSLDPNVYITREHSLVVRQARLADTANYTCVAKNIVARRRSASAAVIVYVNGGWSTWTEWSVCSASCGRGWQKRSRSCTNPAPLNGGAFCEGQNVHDRTVSSLLVSVDGSWSPWSKWSACGLDCTHWRSRECSDPAPRNGGEECQGTDLDTRNCTSDLCVHSASGPEDVALYVGLIAVAVCLVLLLLVLILVYCRKKEGLDSDVADSSILTSGFQPVSIKPSKADNPHLLTIQPDLSTTTTYQGSLCPRQDGPSPKFQLTNGHLLSPLGGGRHTLHHSSPTSEAEEFVSRLSTQNYFRSLPRGTSNMTYGTFNFLGGRLMIPNTGISLLIPPDVIPRGKIYEIYLTLHKPEDVRLPLAGCQTLLSPIVSCGPPGVLLTRPVILAMDHCGEPSPDSWSLRLKKQSCEGSWEQDVLHLGEEAPSHLYYCQLEASACYVFTEQLGRFALVGEALSVAAAKRLKLLLFAPVACTSLEYNIRVYCLHDTHDALKEVVQLEKQLGGQLIQEPRVLHFKDSYHNLRLSIHDVPSSLWKSKLLVSYQEIPFYHIWNGTQRYLHCTFTLERVSPSTSDLACKLWVWQVEGDGQSFSINFNITKDTRFAELLALESEAGVPALVGPSAFKIPFLIRQKIISSLDPPCRRGADWRTLAQKLHLDSHLSFFASKPSPTAMILNLWEARHFPNGNLSQLAAAVAGLGQPDAGLFTVSEAEC

SEQ ID NO: 529 - DNA, 2881 bp, Homo sapiens
  CDS (87)..(2783)
agctggggctccgggctgaggcgctaaagccgccctcccgcccgcggggccccgcgcccggcccgcccgcctgcccgcccgcggccatggccgtccggcccggcctgtggccagcgctcctgggcatagtcctcgccgcttggctccgcggctcgggtgcccagcagagtgccaccgtggccaacccagtgcctggtgccaacccggacctgcttccccacttcctggtggagcccgaggatgtgtacatcgtcaagaacaagccagtgctgcttgtgtgcaaggccgtgcccgccacgcagatcttcttcaagtgcaacggggagtgggtgcgccaggtggaccacgtgatcgagcgcagcacagacgggagcagtggtgagccgaccatggaggtccgcattaatgtctcaaggcagcaggtcgagaaggtgttcgggctggaggaatactggtgccagtgcgtggcatggagctcctcgggcaccaccaagagtcagaaggcctacatccgcatagccagattgcgcaagaacttcgagcaggagccgctggccaaggaggtgtccctggagcagggcatcgtgctgccctgccgtccaccggagggcatccctccagccgaggtggagtggctccggaacgaggacctggtggacccgtccctggaccccaatgtatacatcacgcgggagcacagcctggtggtgcgacaggcccgccttgctgacacggccaactacacctgcgtggccaagaacatcgtggcacgtcgccgcagcgcctccgctgctgtcatcgtctacgtgaacggtgggtggtcgacgtggaccgagtggtccgtctgcagcgccagctgtgggcgcggctggcagaaacggagccggagctgcaccaacccggcgcctctcaacgggggcgctttctgtgaggggcagaatgtccatgaccgcaccgtctcctctctgcttgtctctgtggacggcagctggagcccgtggagcaagtggtcggcctgtgggctggactgcacccactggcggagccgtgagtgctctgacccagcaccccgcaacggaggggaggagtgccagggcactgacctggacacccgcaactgtaccagtgacctctgtgtacacagtgcttctggccctgaggacgtggccctctatgtgggcctcatcgccgtggccgtctgcctggtcctgctgctgcttgtcctcatcctcgtttattgccggaagaaggaggggctggactcagatgtggctgactcgtccattctcacctcaggcttccagcccgtcagcatcaagcccagcaaagcagacaacccccatctgctcaccatccagccggacctcagcaccaccaccacctaccagggcagtctctgtccccggcaggatgggcccagccccaagttccagctcaccaatgggcacctgctcagccccctgggtggcggccgccacacactgcaccacagctctcccacctctgaggccgaggagttcgtctcccgcctctccacccagaactacttccgctccctgccccgaggcaccagcaacatgacctatgggaccttcaacttcctcgggggccggctgatgatccctaatacaggtatcagcctcctcatccccccagatgccataccccgagggaagatctatgagatctacctcacgctgcacaagccggaagacgtgaggttgcccctagctggctgtcagaccctgctgagtcccatcgttagctgtggaccccctggcgtcctgctcacccggccagtcatcctggctatggaccactgtggggagcccagccctgacagctggagcctgcacctcaaaaagcagtcgtgcgagggcagctgggagcaggatgtgctgcacctgggcgaggaggcgccctcccacctctactactgccagctggaggccagtgcctgctacgtcttcaccgagcagctgggccgctttgccctggtgggagaggccctcagcgtggctgccgccaagcgcctcaagctgcttctgtttgcgccggtggcctgcacctccctcgagtacaacatccgggtctactgcctgcatgacacccacgatgcactcaaggaggtggtgcagctggagaagcagctggggggacagctgatccaggagccacgggtcctgcacttcaaggacagttaccacaacctgcgcctatccatccacgatgtgcccagctccctgtggaagagtaagctccttgtcagctaccaggagatccccttttatcacatctggaatggcacgcagcggtacttgcactgcaccttcaccctggagcgtgtcagccccagcactagtgacctggcctgcaagctgtgggtgtggcaggtggagggcgacgggcagagcttcagcatcaacttcaacatcaccaaggacacaaggtttgctgagctgctggctctggagagtgaagcgggggtcccagccctggtgggccccagtgccttcaagatccccttcctcattcggcagaagataatttccagcctggacccaccctgtaggcggggtgccgactggcggactctggcccagaaactccacctggacagccatctcagcttctttgcctccaagcccagccccacagccatgatcctcaacctgtgggaggcgcggcacttccccaacggcaacctcagccagctggctgcagcagtggctggactgggccagccagacgctggcctcttcacagtgtcggaggctgagtgctgaggccggccaggcccgacacctacactctcaccagctttggcacccaccaaggacaggcagaagccggacaggggcccttccccacaccggggaga

SEQ ID NO: 530 - protein, 899 aa, Homo sapiens
MAVRPGLWPALLGIVLAAWLRGSGAQQSATVANPVPGANPDLLPHFLVEPEDVYIVKNKPVLLVCKAVPATQIFFKCNGEWVRQVDHVIERSTDGSSGEPTMEVRINVSRQQVEKVFGLEEYWCQCVAWSSSGTTKSQKAYIRIARLRKNFEQEPLAKEVSLEQGIVLPCRPPEGIPPAEVEWLRNEDLVDPSLDPNVYITREHSLVVRQARLADTANYTCVAKNIVARRRSASAAVIVYVNGGWSTWTEWSVCSASCGRGWQKRSRSCTNPAPLNGGAFCEGQNVHDRTVSSLLVSVDGSWSPWSKWSACGLDCTHWRSRECSDPAPRNGGEECQGTDLDTRNCTSDLCVHSASGPEDVALYVGLIAVAVCLVLLLLVLILVYCRKKEGLDSDVADSSILTSGFQPVSIKPSKADNPHLLTIQPDLSTTTTYQGSLCPRQDGPSPKFQLTNGHLLSPLGGGRHTLHHSSPTSEAEEFVSRLSTQNYFRSLPRGTSNMTYGTFNFLGGRLMIPNTGISLLIPPDAIPRGKIYEIYLTLHKPEDVRLPLAGCQTLLSPIVSCGPPGVLLTRPVILAMDHCGEPSPDSWSLHLKKQSCEGSWEQDVLHLGEEAPSHLYYCQLEASACYVFTEQLGRFALVGEALSVAAAKRLKLLLFAPVACTSLEYNIRVYCLHDTHDALKEVVQLEKQLGGQLIQEPRVLHFKDSYHNLRLSIHDVPSSLWKSKLLVSYQEIPFYHIWNGTQRYLHCTFTLERVSPSTSDLACKLWVWQVEGDGQSFSINFNITKDTRFAELLALESEAGVPALVGPSAFKIPFLIRQKIISSLDPPCRRGADWRTLAQKLHLDSHLSFFASKPSPTAMILNLWEARHFPNGNLSQLAAAVAGLGQPDAGLFTVSEAEC

SEQ ID NO: 531 - DNA, 2881 bp, Homo sapiens
  CDS (87)..(2783)
agctggggctccgggctgaggcgctaaagccgccctcccgcccgcggggccccgcgcccggcccgcccgcctgcccgcccgcggccatggccgtccggcccggcctgtggccagcgctcctgggcatagtcctcgccgcttggctccgcggctcgggtgcccagcagagtgccaccgtggccaacccagtgcctggtgccaacccggacctgcttccccacttcctggtggagcccgaggatgtgtacatcgtcaagaacaagccagtgctgcttgtgtgcaaggccgtgcccgccacgcagatcttcttcaagtgcaacggggagtgggtgcgccaggtggaccacgtgatcgagcgcagcacagacgggagcagtggtgagccgaccatggaggtccgcattaatgtctcaaggcagcaggtcgagaaggtgttcgggctggaggaatactggtgccagtgcgtggcatggagctcctcgggcaccaccaagagtcagaaggcctacatccgcatagccagattgcgcaagaacttcgagcaggagccgctggccaaggaggtgtccctggagcagggcatcgtgctgccctgccgtccaccggagggcatccctccagccgaggtggagtggctccggaacgaggacctggtggacccgtccctggaccccaatgtatacatcacgcgggagcacagcctggtggtgcgacaggcccgccttgctgacacggccaactacacctgcgtggccaagaacatcgtggcacgtcgccgcagcgcctccgctgctgtcatcgtctacgtgaacggtgggtggtcgacgtggaccgagtggtccgtctgcagcgccagctgtgggcgcggctggcagaaacggagccggagctgcaccaacccggcgcctctcaacgggggcgctttctgtgaggggcagaatgtccatgaccgcaccgtctcctctctgcttgtctctgtggacggcagctggagcccgtggagcaagtggtcggcctgtgggctggactgcacccactggcggagccgtgagtgctctgacccagcaccccgcaacggaggggaggagtgccagggcactgacctggacacccgcaactgtaccagtgacctctgtgtacacagtgcttctggccctgaggacgtggccctctatgtgggcctcatcgccgtggccgtctgcctggtcctgctgctgcttgtcctcatcctcgtttattgccggaagaaggaggggctggactcagatgtggctgactcgtccattctcacctcaggcttccagcccgtcagcatcaagcccagcaaagcagacaacccccatctgctcaccatccagccggacctcagcaccaccaccacctaccagggcagtctctgtccccggcaggatgggcccagccccaagttccagctcaccaatgggcacctgctcagccccctgggtggcggccgccacacactgcaccacagctctcccacctctgaggccgaggagttcgtctcccgcctctccacccagaactacttccgctccctgccccgaggcaccagcaacatgacctatgggaccttcaacttcctcgggggccggctgatgatccctaatacaggtatcagcctcctcatccccccagatgccataccccgagggaagatctatgagatctacctcacgctgcacaagccggaagacgtgaggttgcccctagctggctgtcagaccctgctgagtcccatcgttagctgtggaccccctggcgtcctgctcacccggccagtcatcctggctatggaccactgtggggagcccagccctgacagctggagcctgcgcctcaaaaagcagtcgtgcgagggcagctgggagcaggatgtgctgcacctgggcgaggaggcgccctcccacctctactactgccagctggaggccagtgcctgctacatcttcaccgagcagctgggccgctttgccctggtgggagaggccctcagcgtggctgccgccaagcgcctcaagctgcttctgtttgcgccggtggcctgcacctccctcgagtacaacatccgggtctactgcctgcatgacacccacgatgcactcaaggaggtggtgcagctggagaagcagctggggggacagctgatccaggagccacgggtcctgcacttcaaggacagttaccacaacctgcgcctatccatccacgatgtgcccagctccctgtggaagagtaagctccttgtcagctaccaggagatccccttttatcacatctggaatggcacgcagcggtacttgcactgcaccttcaccctggagcgtgtcagccccagcactagtgacctggcctgcaagctgtgggtgtggcaggtggagggcgacgggcagagcttcagcatcaacttcaacatcaccaaggacacaaggtttgctgagctgctggctctggagagtgaagcgggggtcccagccctggtgggccccagtgccttcaagatccccttcctcattcggcagaagataatttccagcctggacccaccctgtaggcggggtgccgactggcggactctggcccagaaactccacctggacagccatctcagcttctttgcctccaagcccagccccacagccatgatcctcaacctgtgggaggcgcggcacttccccaacggcaacctcagccagctggctgcagcagtggctggactgggccagccagacgctggcctcttcacagtgtcggaggctgagtgctgaggccggccaggcccgacacctacactctcaccagctttggcacccaccaaggacaggcagaagccggacaggggcccttccccacaccggggaga

SEQ ID NO: 532 - protein, 899 aa, Homo sapiens
MAVRPGLWPALLGIVLAAWLRGSGAQQSATVANPVPGANPDLLPHFLVEPEDVYIVKNKPVLLVCKAVPATQIFFKCNGEWVRQVDHVIERSTDGSSGEPTMEVRINVSRQQVEKVFGLEEYWCQCVAWSSSGTTKSQKAYIRIARLRKNFEQEPLAKEVSLEQGIVLPCRPPEGIPPAEVEWLRNEDLVDPSLDPNVYITREHSLVVRQARLADTANYTCVAKNIVARRRSASAAVIVYVNGGWSTWTEWSVCSASCGRGWQKRSRSCTNPAPLNGGAFCEGQNVHDRTVSSLLVSVDGSWSPWSKWSACGLDCTHWRSRECSDPAPRNGGEECQGTDLDTRNCTSDLCVHSASGPEDVALYVGLIAVAVCLVLLLLVLILVYCRKKEGLDSDVADSSILTSGFQPVSIKPSKADNPHLLTIQPDLSTTTTYQGSLCPRQDGPSPKFQLTNGHLLSPLGGGRHTLHHSSPTSEAEEFVSRLSTQNYFRSLPRGTSNMTYGTFNFLGGRLMIPNTGISLLIPPDAIPRGKIYEIYLTLHKPEDVRLPLAGCQTLLSPIVSCGPPGVLLTRPVILAMDHCGEPSPDSWSLRLKKQSCEGSWEQDVLHLGEEAPSHLYYCQLEASACYIFTEQLGRFALVGEALSVAAAKRLKLLLFAPVACTSLEYNIRVYCLHDTHDALKEVVQLEKQLGGQLIQEPRVLHFKDSYHNLRLSIHDVPSSLWKSKLLVSYQEIPFYHIWNGTQRYLHCTFTLERVSPSTSDLACKLWVWQVEGDGQSFSINFNITKDTRFAELLALESEAGVPALVGPSAFKIPFLIRQKIISSLDPPCRRGADWRTLAQKLHLDSHLSFFASKPSPTAMILNLWEARHFPNGNLSQLAAAVAGLGQPDAGLFTVSEAEC

SEQ ID NO: 533 - DNA, 2881 bp, Homo sapiens
  CDS (87)..(2783)
agctggggctccgggctgaggcgctaaagccgccctcccgcccgcggggccccgcgcccggcccgcccgcctgcccgcccgcggccatggccgtccggcccggcctgtggccagcgctcctgggcatagtcctcgccgcttggctccgcggctcgggtgcccagcagagtgccaccgtggccaacccagtgcctggtgccaacccggacctgcttccccacttcctggtggagcccgaggatgtgtacatcgtcaagaacaagccagtgctgcttgtgtgcaaggccgtgcccgccacgcagatcttcttcaagtgcaacggggagtgggtgcgccaggtggaccacgtgatcgagcgcagcacagacgggagcagtggtgagccgaccatggaggtccgcattaatgtctcaaggcagcaggtcgagaaggtgttcgggctggaggaatactggtgccagtgcgtggcatggagctcctcgggcaccaccaagagtcagaaggcctacatccgcatagccagattgcgcaagaacttcgagcaggagccgctggccaaggaggtgtccctggagcagggcatcgtgctgccctgccgtccaccggagggcatccctccagccgaggtggagtggctccggaacgaggacctggtggacccgtccctggaccccaatgtatacatcacgcgggagcacagcctggtggtgcgacaggcccgccttgctgacacggccaactacacctgcgtggccaagaacatcgtggcacgtcgccgcagcgcctccgctgctgtcatcgtctacgtgaacggtgggtggtcgacgtggaccgagtggtccgtctgcagcgccagctgtgggcgcggctggcagaaacggagccggagctgcaccaacccggcgcctctcaacgggggcgctttctgtgaggggcagaatgtccatgaccgcaccgtctcctctctgcttgtctctgtggacggcagctggagcccgtggagcaagtggtcggcctgtgggctggactgcacccactggcggagccgtgagtgctctgacccagcaccccgcaacggaggggaggagtgccagggcactgacctggacacccgcaactgtaccagtgacctctgtgtacacagtgcttctggccctgaggacgtggccctctatgtgggcctcatcgccgtggccgtctgcctggtcctgctgctgcttgtcctcatcctcgtttattgccggaagaaggaggggctggactcagatgtggctgactcgtccattctcacctcaggcttccagcccgtcagcatcaagcccagcaaagcagacaacccccatctgctcaccatccagccggacctcagcaccaccaccacctaccagggcagtctctgtccccggcaggatgggcccagccccaagttccagctcaccaatgggcacctgctcagccccctgggtggcggccgccacacactgcaccacagctctcccacctctgaggccgaggagttcgtctcccgcctctccacccagaactacttccgctccctgccccgaggcaccagcaacatgacctatgggaccttcaacttcctcgggggccggctgatgatccctaatacaggtatcagcctcctcatccccccagatgccataccccgagggaagatctatgagatctacctcacgctgcacaagccggaagacgtgaggttgcccctagctggctgtcagaccctgctgagtcccatcgttagctgtggaccccctggcgtcctgctcacccggccagtcatcctggctatggaccactgtggggagcccagccctgacagctggagcctgcgcctcaaaaagcagtcgtgcgagggcagctgggagcaggatgtgctgcacctgggcgaggaggcgccctcccacctctactactgccagctggaggccagtgcctgctacgtcttcaccgagcagctgggccgctttgccctggtgggagaggccctcagcgtggctgccaccaagcgcctcaagctgcttctgtttgcgccggtggcctgcacctccctcgagtacaacatccgggtctactgcctgcatgacacccacgatgcactcaaggaggtggtgcagctggagaagcagctggggggacagctgatccaggagccacgggtcctgcacttcaaggacagttaccacaacctgcgcctatccatccacgatgtgcccagctccctgtggaagagtaagctccttgtcagctaccaggagatccccttttatcacatctggaatggcacgcagcggtacttgcactgcaccttcaccctggagcgtgtcagccccagcactagtgacctggcctgcaagctgtgggtgtggcaggtggagggcgacgggcagagcttcagcatcaacttcaacatcaccaaggacacaaggtttgctgagctgctggctctggagagtgaagcgggggtcccagccctggtgggccccagtgccttcaagatccccttcctcattcggcagaagataatttccagcctggacccaccctgtaggcggggtgccgactggcggactctggcccagaaactccacctggacagccatctcagcttctttgcctccaagcccagccccacagccatgatcctcaacctgtgggaggcgcggcacttccccaacggcaacctcagccagctggctgcagcagtggctggactgggccagccagacgctggcctcttcacagtgtcggaggctgagtgctgaggccggccaggcccgacacctacactctcaccagctttggcacccaccaaggacaggcagaagccggacaggggcccttccccacaccggggaga

SEQ ID NO: 534 - protein, 899 aa, Homo sapiens
MAVRPGLWPALLGIVLAAWLRGSGAQQSATVANPVPGANPDLLPHFLVEPEDVYIVKNKPVLLVCKAVPATQIFFKCNGEWVRQVDHVIERSTDGSSGEPTMEVRINVSRQQVEKVFGLEEYWCQCVAWSSSGTTKSQKAYIRIARLRKNFEQEPLAKEVSLEQGIVLPCRPPEGIPPAEVEWLRNEDLVDPSLDPNVYITREHSLVVRQARLADTANYTCVAKNIVARRRSASAAVIVYVNGGWSTWTEWSVCSASCGRGWQKRSRSCTNPAPLNGGAFCEGQNVHDRTVSSLLVSVDGSWSPWSKWSACGLDCTHWRSRECSDPAPRNGGEECQGTDLDTRNCTSDLCVHSASGPEDVALYVGLIAVAVCLVLLLLVLILVYCRKKEGLDSDVADSSILTSGFQPVSIKPSKADNPHLLTIQPDLSTTTTYQGSLCPRQDGPSPKFQLTNGHLLSPLGGGRHTLHHSSPTSEAEEFVSRLSTQNYFRSLPRGTSNMTYGTFNFLGGRLMIPNTGISLLIPPDAIPRGKIYEIYLTLHKPEDVRLPLAGCQTLLSPIVSCGPPGVLLTRPVILAMDHCGEPSPDSWSLRLKKQSCEGSWEQDVLHLGEEAPSHLYYCQLEASACYVFTEQLGRFALVGEALSVAATKRLKLLLFAPVACTSLEYNIRVYCLHDTHDALKEVVQLEKQLGGQLIQEPRVLHFKDSYHNLRLSIHDVPSSLWKSKLLVSYQEIPFYHIWNGTQRYLHCTFTLERVSPSTSDLACKLWVWQVEGDGQSFSINFNITKDTRFAELLALESEAGVPALVGPSAFKIPFLIRQKIISSLDPPCRRGADWRTLAQKLHLDSHLSFFASKPSPTAMILNLWEARHFPNGNLSQLAAAVAGLGQPDAGLFTVSEAEC

SEQ ID NO: 535 - DNA, 2881 bp, Homo sapiens
  CDS (87)..(2783)
agctggggctccgggctgaggcgctaaagccgccctcccgcccgcggggccccgcgcccggcccgcccgcctgcccgcccgcggccatggccgtccggcccggcctgtggccagcgctcctgggcatagtcctcgccgcttggctccgcggctcgggtgcccagcagagtgccaccgtggccaacccagtgcctggtgccaacccggacctgcttccccacttcctggtggagcccgaggatgtgtacatcgtcaagaacaagccagtgctgcttgtgtgcaaggccgtgcccgccacgcagatcttcttcaagtgcaacggggagtgggtgcgccaggtggaccacgtgatcgagcgcagcacagacgggagcagtggtgagccgaccatggaggtccgcattaatgtctcaaggcagcaggtcgagaaggtgttcgggctggaggaatactggtgccagtgcgtggcatggagctcctcgggcaccaccaagagtcagaaggcctacatccgcatagccagattgcgcaagaacttcgagcaggagccgctggccaaggaggtgtccctggagcagggcatcgtgctgccctgccgtccaccggagggcatccctccagccgaggtggagtggctccggaacgaggacctggtggacccgtccctggaccccaatgtatacatcacgcgggagcacagcctggtggtgcgacaggcccgccttgctgacacggccaactacacctgcgtggccaagaacatcgtggcacgtcgccgcagcgcctccgctgctgtcatcgtctacgtgaacggtgggtggtcgacgtggaccgagtggtccgtctgcagcgccagctgtgggcgcggctggcagaaacggagccggagctgcaccaacccggcgcctctcaacgggggcgctttctgtgaggggcagaatgtccatgaccgcaccgtctcctctctgcttgtctctgtggacggcagctggagcccgtggagcaagtggtcggcctgtgggctggactgcacccactggcggagccgtgagtgctctgacccagcaccccgcaacggaggggaggagtgccagggcactgacctggacacccgcaactgtaccagtgacctctgtgtacacagtgcttctggccctgaggacgtggccctctatgtgggcctcatcgccgtggccgtctgcctggtcctgctgctgcttgtcctcatcctcgtttattgccggaagaaggaggggctggactcagatgtggctgactcgtccattctcacctcaggcttccagcccgtcagcatcaagcccagcaaagcagacaacccccatctgctcaccatccagccggacctcagcaccaccaccacctaccagggcagtctctgtccccggcaggatgggcccagccccaagttccagctcaccaatgggcacctgctcagccccctgggtggcggccgccacacactgcaccacagctctcccacctctgaggccgaggagttcgtctcccgcctctccacccagaactacttccgctccctgccccgaggcaccagcaacatgacctatgggaccttcaacttcctcgggggccggctgatgatccctaatacaggtatcagcctcctcatccccccagatgccataccccgagggaagatctatgagatctacctcacgctgcacaagccggaagacgtgaggttgcccctagctggctgtcagaccctgctgagtcccatcgttagctgtggaccccctggcgtcctgctcacccggccagtcatcctggctatggaccactgtggggagcccagccctgacagctggagcctgcgcctcaaaaagcagtcgtgcgagggcagctgggagcaggatgtgctgcacctgggcgaggaggcgccctcccacctctactactgccagctggaggccagtgcctgctacgtcttcaccgagcagctgggccgctttgccctggtgggagaggccctcagcgtggctgccgccaagcgcctcaggctgcttctgtttgcgccggtggcctgcacctccctcgagtacaacatccgggtctactgcctgcatgacacccacgatgcactcaaggaggtggtgcagctggagaagcagctggggggacagctgatccaggagccacgggtcctgcacttcaaggacagttaccacaacctgcgcctatccatccacgatgtgcccagctccctgtggaagagtaagctccttgtcagctaccaggagatccccttttatcacatctggaatggcacgcagcggtacttgcactgcaccttcaccctggagcgtgtcagccccagcactagtgacctggcctgcaagctgtgggtgtggcaggtggagggcgacgggcagagcttcagcatcaacttcaacatcaccaaggacacaaggtttgctgagctgctggctctggagagtgaagcgggggtcccagccctggtgggccccagtgccttcaagatccccttcctcattcggcagaagataatttccagcctggacccaccctgtaggcggggtgccgactggcggactctggcccagaaactccacctggacagccatctcagcttctttgcctccaagcccagccccacagccatgatcctcaacctgtgggaggcgcggcacttccccaacggcaacctcagccagctggctgcagcagtggctggactgggccagccagacgctggcctcttcacagtgtcggaggctgagtgctgaggccggccaggcccgacacctacactctcaccagctttggcacccaccaaggacaggcagaagccggacaggggcccttccccacaccggggaga

SEQ ID NO: 536 - protein, 899 aa, Homo sapiens
MAVRPGLWPALLGIVLAAWLRGSGAQQSATVANPVPGANPDLLPHFLVEPEDVYIVKNKPVLLVCKAVPATQIFFKCNGEWVRQVDHVIERSTDGSSGEPTMEVRINVSRQQVEKVFGLEEYWCQCVAWSSSGTTKSQKAYIRIARLRKNFEQEPLAKEVSLEQGIVLPCRPPEGIPPAEVEWLRNEDLVDPSLDPNVYITREHSLVVRQARLADTANYTCVAKNIVARRRSASAAVIVYVNGGWSTWTEWSVCSASCGRGWQKRSRSCTNPAPLNGGAFCEGQNVHDRTVSSLLVSVDGSWSPWSKWSACGLDCTHWRSRECSDPAPRNGGEECQGTDLDTRNCTSDLCVHSASGPEDVALYVGLIAVAVCLVLLLLVLILVYCRKKEGLDSDVADSSILTSGFQPVSIKPSKADNPHLLTIQPDLSTTTTYQGSLCPRQDGPSPKFQLTNGHLLSPLGGGRHTLHHSSPTSEAEEFVSRLSTQNYFRSLPRGTSNMTYGTFNFLGGRLMIPNTGISLLIPPDAIPRGKIYEIYLTLHKPEDVRLPLAGCQTLLSPIVSCGPPGVLLTRPVILAMDHCGEPSPDSWSLRLKKQSCEGSWEQDVLHLGEEAPSHLYYCQLEASACYVFTEQLGRFALVGEALSVAAAKRLRLLLFAPVACTSLEYNIRVYCLHDTHDALKEVVQLEKQLGGQLIQEPRVLHFKDSYHNLRLSIHDVPSSLWKSKLLVSYQEIPFYHIWNGTQRYLHCTFTLERVSPSTSDLACKLWVWQVEGDGQSFSINFNITKDTRFAELLALESEAGVPALVGPSAFKIPFLIRQKIISSLDPPCRRGADWRTLAQKLHLDSHLSFFASKPSPTAMILNLWEARHFPNGNLSQLAAAVAGLGQPDAGLFTVSEAEC

SEQ ID NO: 537 - DNA, 2881 bp, Homo sapiens
  CDS (87)..(2783)
agctggggctccgggctgaggcgctaaagccgccctcccgcccgcggggccccgcgcccggcccgcccgcctgcccgcccgcggccatggccgtccggcccggcctgtggccagcgctcctgggcatagtcctcgccgcttggctccgcggctcgggtgcccagcagagtgccaccgtggccaacccagtgcctggtgccaacccggacctgcttccccacttcctggtggagcccgaggatgtgtacatcgtcaagaacaagccagtgctgcttgtgtgcaaggccgtgcccgccacgcagatcttcttcaagtgcaacggggagtgggtgcgccaggtggaccacgtgatcgagcgcagcacagacgggagcagtggtgagccgaccatggaggtccgcattaatgtctcaaggcagcaggtcgagaaggtgttcgggctggaggaatactggtgccagtgcgtggcatggagctcctcgggcaccaccaagagtcagaaggcctacatccgcatagccagattgcgcaagaacttcgagcaggagccgctggccaaggaggtgtccctggagcagggcatcgtgctgccctgccgtccaccggagggcatccctccagccgaggtggagtggctccggaacgaggacctggtggacccgtccctggaccccaatgtatacatcacgcgggagcacagcctggtggtgcgacaggcccgccttgctgacacggccaactacacctgcgtggccaagaacatcgtggcacgtcgccgcagcgcctccgctgctgtcatcgtctacgtgaacggtgggtggtcgacgtggaccgagtggtccgtctgcagcgccagctgtgggcgcggctggcagaaacggagccggagctgcaccaacccggcgcctctcaacgggggcgctttctgtgaggggcagaatgtccatgaccgcaccgtctcctctctgcttgtctctgtggacggcagctggagcccgtggagcaagtggtcggcctgtgggctggactgcacccactggcggagccgtgagtgctctgacccagcaccccgcaacggaggggaggagtgccagggcactgacctggacacccgcaactgtaccagtgacctctgtgtacacagtgcttctggccctgaggacgtggccctctatgtgggcctcatcgccgtggccgtctgcctggtcctgctgctgcttgtcctcatcctcgtttattgccggaagaaggaggggctggactcagatgtggctgactcgtccattctcacctcaggcttccagcccgtcagcatcaagcccagcaaagcagacaacccccatctgctcaccatccagccggacctcagcaccaccaccacctaccagggcagtctctgtccccggcaggatgggcccagccccaagttccagctcaccaatgggcacctgctcagccccctgggtggcggccgccacacactgcaccacagctctcccacctctgaggccgaggagttcgtctcccgcctctccacccagaactacttccgctccctgccccgaggcaccagcaacatgacctatgggaccttcaacttcctcgggggccggctgatgatccctaatacaggtatcagcctcctcatccccccagatgccataccccgagggaagatctatgagatctacctcacgctgcacaagccggaagacgtgaggttgcccctagctggctgtcagaccctgctgagtcccatcgttagctgtggaccccctggcgtcctgctcacccggccagtcatcctggctatggaccactgtggggagcccagccctgacagctggagcctgcgcctcaaaaagcagtcgtgcgagggcagctgggagcaggatgtgctgcacctgggcgaggaggcgccctcccacctctactactgccagctggaggccagtgcctgctacgtcttcaccgagcagctgggccgctttgccctggtgggagaggccctcagcgtggctgccgccaagcgcctcaagctgcttctgtttgcgccggtggcctgcacctccctcgagtacaacatccgggtctactgcctgcatgacacccacgatgcactcaaggagctggtgcagctggagaagcagctggggggacagctgatccaggagccacgggtcctgcacttcaaggacagttaccacaacctgcgcctatccatccacgatgtgcccagctccctgtggaagagtaagctccttgtcagctaccaggagatccccttttatcacatctggaatggcacgcagcggtacttgcactgcaccttcaccctggagcgtgtcagccccagcactagtgacctggcctgcaagctgtgggtgtggcaggtggagggcgacgggcagagcttcagcatcaacttcaacatcaccaaggacacaaggtttgctgagctgctggctctggagagtgaagcgggggtcccagccctggtgggccccagtgccttcaagatccccttcctcattcggcagaagataatttccagcctggacccaccctgtaggcggggtgccgactggcggactctggcccagaaactccacctggacagccatctcagcttctttgcctccaagcccagccccacagccatgatcctcaacctgtgggaggcgcggcacttccccaacggcaacctcagccagctggctgcagcagtggctggactgggccagccagacgctggcctcttcacagtgtcggaggctgagtgctgaggccggccaggcccgacacctacactctcaccagctttggcacccaccaaggacaggcagaagccggacaggggcccttccccacaccggggaga

SEQ ID NO: 538 - protein, 899 aa, Homo sapiens
MAVRPGLWPALLGIVLAAWLRGSGAQQSATVANPVPGANPDLLPHFLVEPEDVYIVKNKPVLLVCKAVPATQIFFKCNGEWVRQVDHVIERSTDGSSGEPTMEVRINVSRQQVEKVFGLEEYWCQCVAWSSSGTTKSQKAYIRIARLRKNFEQEPLAKEVSLEQGIVLPCRPPEGIPPAEVEWLRNEDLVDPSLDPNVYITREHSLVVRQARLADTANYTCVAKNIVARRRSASAAVIVYVNGGWSTWTEWSVCSASCGRGWQKRSRSCTNPAPLNGGAFCEGQNVHDRTVSSLLVSVDGSWSPWSKWSACGLDCTHWRSRECSDPAPRNGGEECQGTDLDTRNCTSDLCVHSASGPEDVALYVGLIAVAVCLVLLLLVLILVYCRKKEGLDSDVADSSILTSGFQPVSIKPSKADNPHLLTIQPDLSTTTTYQGSLCPRQDGPSPKFQLTNGHLLSPLGGGRHTLHHSSPTSEAEEFVSRLSTQNYFRSLPRGTSNMTYGTFNFLGGRLMIPNTGISLLIPPDAIPRGKIYEIYLTLHKPEDVRLPLAGCQTLLSPIVSCGPPGVLLTRPVILAMDHCGEPSPDSWSLRLKKQSCEGSWEQDVLHLGEEAPSHLYYCQLEASACYVFTEQLGRFALVGEALSVAAAKRLKLLLFAPVACTSLEYNIRVYCLHDTHDALKELVQLEKQLGGQLIQEPRVLHFKDSYHNLRLSIHDVPSSLWKSKLLVSYQEIPFYHIWNGTQRYLHCTFTLERVSPSTSDLACKLWVWQVEGDGQSFSINFNITKDTRFAELLALESEAGVPALVGPSAFKIPFLIRQKIISSLDPPCRRGADWRTLAQKLHLDSHLSFFASKPSPTAMILNLWEARHFPNGNLSQLAAAVAGLGQPDAGLFTVSEAEC

SEQ ID NO: 539 - DNA, 2881 bp, Homo sapiens
  CDS (87)..(2783)
agctggggctccgggctgaggcgctaaagccgccctcccgcccgcggggccccgcgcccggcccgcccgcctgcccgcccgcggccatggccgtccggcccggcctgtggccagcgctcctgggcatagtcctcgccgcttggctccgcggctcgggtgcccagcagagtgccaccgtggccaacccagtgcctggtgccaacccggacctgcttccccacttcctggtggagcccgaggatgtgtacatcgtcaagaacaagccagtgctgcttgtgtgcaaggccgtgcccgccacgcagatcttcttcaagtgcaacggggagtgggtgcgccaggtggaccacgtgatcgagcgcagcacagacgggagcagtggtgagccgaccatggaggtccgcattaatgtctcaaggcagcaggtcgagaaggtgttcgggctggaggaatactggtgccagtgcgtggcatggagctcctcgggcaccaccaagagtcagaaggcctacatccgcatagccagattgcgcaagaacttcgagcaggagccgctggccaaggaggtgtccctggagcagggcatcgtgctgccctgccgtccaccggagggcatccctccagccgaggtggagtggctccggaacgaggacctggtggacccgtccctggaccccaatgtatacatcacgcgggagcacagcctggtggtgcgacaggcccgccttgctgacacggccaactacacctgcgtggccaagaacatcgtggcacgtcgccgcagcgcctccgctgctgtcatcgtctacgtgaacggtgggtggtcgacgtggaccgagtggtccgtctgcagcgccagctgtgggcgcggctggcagaaacggagccggagctgcaccaacccggcgcctctcaacgggggcgctttctgtgaggggcagaatgtccatgaccgcaccgtctcctctctgcttgtctctgtggacggcagctggagcccgtggagcaagtggtcggcctgtgggctggactgcacccactggcggagccgtgagtgctctgacccagcaccccgcaacggaggggaggagtgccagggcactgacctggacacccgcaactgtaccagtgacctctgtgtacacagtgcttctggccctgaggacgtggccctctatgtgggcctcatcgccgtggccgtctgcctggtcctgctgctgcttgtcctcatcctcgtttattgccggaagaaggaggggctggactcagatgtggctgactcgtccattctcacctcaggcttccagcccgtcagcatcaagcccagcaaagcagacaacccccatctgctcaccatccagccggacctcagcaccaccaccacctaccagggcagtctctgtccccggcaggatgggcccagccccaagttccagctcaccaatgggcacctgctcagccccctgggtggcggccgccacacactgcaccacagctctcccacctctgaggccgaggagttcgtctcccgcctctccacccagaactacttccgctccctgccccgaggcaccagcaacatgacctatgggaccttcaacttcctcgggggccggctgatgatccctaatacaggtatcagcctcctcatccccccagatgccataccccgagggaagatctatgagatctacctcacgctgcacaagccggaagacgtgaggttgcccctagctggctgtcagaccctgctgagtcccatcgttagctgtggaccccctggcgtcctgctcacccggccagtcatcctggctatggaccactgtggggagcccagccctgacagctggagcctgcgcctcaaaaagcagtcgtgcgagggcagctgggagcaggatgtgctgcacctgggcgaggaggcgccctcccacctctactactgccagctggaggccagtgcctgctacgtcttcaccgagcagctgggccgctttgccctggtgggagaggccctcagcgtggctgccgccaagcgcctcaagctgcttctgtttgcgccggtggcctgcacctccctcgagtacaacatccgggtctactgcctgcatgacacccacgatgcactcaaggaggtggtgcagctggagaagcagctggggggacagctgatccaggagccacgggtcctgcacttcaaggacagttaccacaacctgcgcctatccatccacgatgtgcccagctccctgtggaagagtaagctccttgtcagctaccaggagatccccttttatcacatctggaatgacacgcagcggtacttgcactgcaccttcaccctggagcgtgtcagccccagcactagtgacctggcctgcaagctgtgggtgtggcaggtggagggcgacgggcagagcttcagcatcaacttcaacatcaccaaggacacaaggtttgctgagctgctggctctggagagtgaagcgggggtcccagccctggtgggccccagtgccttcaagatccccttcctcattcggcagaagataatttccagcctggacccaccctgtaggcggggtgccgactggcggactctggcccagaaactccacctggacagccatctcagcttctttgcctccaagcccagccccacagccatgatcctcaacctgtgggaggcgcggcacttccccaacggcaacctcagccagctggctgcagcagtggctggactgggccagccagacgctggcctcttcacagtgtcggaggctgagtgctgaggccggccaggcccgacacctacactctcaccagctttggcacccaccaaggacaggcagaagccggacaggggcccttccccacaccggggaga

SEQ ID NO: 540 - protein, 899 aa, Homo sapiens
MAVRPGLWPALLGIVLAAWLRGSGAQQSATVANPVPGANPDLLPHFLVEPEDVYIVKNKPVLLVCKAVPATQIFFKCNGEWVRQVDHVIERSTDGSSGEPTMEVRINVSRQQVEKVFGLEEYWCQCVAWSSSGTTKSQKAYIRIARLRKNFEQEPLAKEVSLEQGIVLPCRPPEGIPPAEVEWLRNEDLVDPSLDPNVYITREHSLVVRQARLADTANYTCVAKNIVARRRSASAAVIVYVNGGWSTWTEWSVCSASCGRGWQKRSRSCTNPAPLNGGAFCEGQNVHDRTVSSLLVSVDGSWSPWSKWSACGLDCTHWRSRECSDPAPRNGGEECQGTDLDTRNCTSDLCVHSASGPEDVALYVGLIAVAVCLVLLLLVLILVYCRKKEGLDSDVADSSILTSGFQPVSIKPSKADNPHLLTIQPDLSTTTTYQGSLCPRQDGPSPKFQLTNGHLLSPLGGGRHTLHHSSPTSEAEEFVSRLSTQNYFRSLPRGTSNMTYGTFNFLGGRLMIPNTGISLLIPPDAIPRGKIYEIYLTLHKPEDVRLPLAGCQTLLSPIVSCGPPGVLLTRPVILAMDHCGEPSPDSWSLRLKKQSCEGSWEQDVLHLGEEAPSHLYYCQLEASACYVFTEQLGRFALVGEALSVAAAKRLKLLLFAPVACTSLEYNIRVYCLHDTHDALKEVVQLEKQLGGQLIQEPRVLHFKDSYHNLRLSIHDVPSSLWKSKLLVSYQEIPFYHIWNDTQRYLHCTFTLERVSPSTSDLACKLWVWQVEGDGQSFSINFNITKDTRFAELLALESEAGVPALVGPSAFKIPFLIRQKIISSLDPPCRRGADWRTLAQKLHLDSHLSFFASKPSPTAMILNLWEARHFPNGNLSQLAAAVAGLGQPDAGLFTVSEAEC

SEQ ID NO: 541 - DNA, 2881 bp, Homo sapiens
  CDS (87)..(2783)
agctggggctccgggctgaggcgctaaagccgccctcccgcccgcggggccccgcgcccggcccgcccgcctgcccgcccgcggccatggccgtccggcccggcctgtggccagcgctcctgggcatagtcctcgccgcttggctccgcggctcgggtgcccagcagagtgccaccgtggccaacccagtgcctggtgccaacccggacctgcttccccacttcctggtggagcccgaggatgtgtacatcgtcaagaacaagccagtgctgcttgtgtgcaaggccgtgcccgccacgcagatcttcttcaagtgcaacggggagtgggtgcgccaggtggaccacgtgatcgagcgcagcacagacgggagcagtggtgagccgaccatggaggtccgcattaatgtctcaaggcagcaggtcgagaaggtgttcgggctggaggaatactggtgccagtgcgtggcatggagctcctcgggcaccaccaagagtcagaaggcctacatccgcatagccagattgcgcaagaacttcgagcaggagccgctggccaaggaggtgtccctggagcagggcatcgtgctgccctgccgtccaccggagggcatccctccagccgaggtggagtggctccggaacgaggacctggtggacccgtccctggaccccaatgtatacatcacgcgggagcacagcctggtggtgcgacaggcccgccttgctgacacggccaactacacctgcgtggccaagaacatcgtggcacgtcgccgcagcgcctccgctgctgtcatcgtctacgtgaacggtgggtggtcgacgtggaccgagtggtccgtctgcagcgccagctgtgggcgcggctggcagaaacggagccggagctgcaccaacccggcgcctctcaacgggggcgctttctgtgaggggcagaatgtccatgaccgcaccgtctcctctctgcttgtctctgtggacggcagctggagcccgtggagcaagtggtcggcctgtgggctggactgcacccactggcggagccgtgagtgctctgacccagcaccccgcaacggaggggaggagtgccagggcactgacctggacacccgcaactgtaccagtgacctctgtgtacacagtgcttctggccctgaggacgtggccctctatgtgggcctcatcgccgtggccgtctgcctggtcctgctgctgcttgtcctcatcctcgtttattgccggaagaaggaggggctggactcagatgtggctgactcgtccattctcacctcaggcttccagcccgtcagcatcaagcccagcaaagcagacaacccccatctgctcaccatccagccggacctcagcaccaccaccacctaccagggcagtctctgtccccggcaggatgggcccagccccaagttccagctcaccaatgggcacctgctcagccccctgggtggcggccgccacacactgcaccacagctctcccacctctgaggccgaggagttcgtctcccgcctctccacccagaactacttccgctccctgccccgaggcaccagcaacatgacctatgggaccttcaacttcctcgggggccggctgatgatccctaatacaggtatcagcctcctcatccccccagatgccataccccgagggaagatctatgagatctacctcacgctgcacaagccggaagacgtgaggttgcccctagctggctgtcagaccctgctgagtcccatcgttagctgtggaccccctggcgtcctgctcacccggccagtcatcctggctatggaccactgtggggagcccagccctgacagctggagcctgcgcctcaaaaagcagtcgtgcgagggcagctgggagcaggatgtgctgcacctgggcgaggaggcgccctcccacctctactactgccagctggaggccagtgcctgctacgtcttcaccgagcagctgggccgctttgccctggtgggagaggccctcagcgtggctgccgccaagcgcctcaagctgcttctgtttgcgccggtggcctgcacctccctcgagtacaacatccgggtctactgcctgcatgacacccacgatgcactcaaggaggtggtgcagctggagaagcagctggggggacagctgatccaggagccacgggtcctgcacttcaaggacagttaccacaacctgcgcctatccatccacgatgtgcccagctccctgtggaagagtaagctccttgtcagctaccaggagatccccttttatcacatctggaatggcacgcagcggtacttgcaccgcaccttcaccctggagcgtgtcagccccagcactagtgacctggcctgcaagctgtgggtgtggcaggtggagggcgacgggcagagcttcagcatcaacttcaacatcaccaaggacacaaggtttgctgagctgctggctctggagagtgaagcgggggtcccagccctggtgggccccagtgccttcaagatccccttcctcattcggcagaagataatttccagcctggacccaccctgtaggcggggtgccgactggcggactctggcccagaaactccacctggacagccatctcagcttctttgcctccaagcccagccccacagccatgatcctcaacctgtgggaggcgcggcacttccccaacggcaacctcagccagctggctgcagcagtggctggactgggccagccagacgctggcctcttcacagtgtcggaggctgagtgctgaggccggccaggcccgacacctacactctcaccagctttggcacccaccaaggacaggcagaagccggacaggggcccttccccacaccggggaga

SEQ ID NO: 542 - protein, 899 aa, Homo sapiens
MAVRPGLWPALLGIVLAAWLRGSGAQQSATVANPVPGANPDLLPHFLVEPEDVYIVKNKPVLLVCKAVPATQIFFKCNGEWVRQVDHVIERSTDGSSGEPTMEVRINVSRQQVEKVFGLEEYWCQCVAWSSSGTTKSQKAYIRIARLRKNFEQEPLAKEVSLEQGIVLPCRPPEGIPPAEVEWLRNEDLVDPSLDPNVYITREHSLVVRQARLADTANYTCVAKNIVARRRSASAAVIVYVNGGWSTWTEWSVCSASCGRGWQKRSRSCTNPAPLNGGAFCEGQNVHDRTVSSLLVSVDGSWSPWSKWSACGLDCTHWRSRECSDPAPRNGGEECQGTDLDTRNCTSDLCVHSASGPEDVALYVGLIAVAVCLVLLLLVLILVYCRKKEGLDSDVADSSILTSGFQPVSIKPSKADNPHLLTIQPDLSTTTTYQGSLCPRQDGPSPKFQLTNGHLLSPLGGGRHTLHHSSPTSEAEEFVSRLSTQNYFRSLPRGTSNMTYGTFNFLGGRLMIPNTGISLLIPPDAIPRGKIYEIYLTLHKPEDVRLPLAGCQTLLSPIVSCGPPGVLLTRPVILAMDHCGEPSPDSWSLRLKKQSCEGSWEQDVLHLGEEAPSHLYYCQLEASACYVFTEQLGRFALVGEALSVAAAKRLKLLLFAPVACTSLEYNIRVYCLHDTHDALKEVVQLEKQLGGQLIQEPRVLHFKDSYHNLRLSIHDVPSSLWKSKLLVSYQEIPFYHIWNGTQRYLHRTFTLERVSPSTSDLACKLWVWQVEGDGQSFSINFNITKDTRFAELLALESEAGVPALVGPSAFKIPFLIRQKIISSLDPPCRRGADWRTLAQKLHLDSHLSFFASKPSPTAMILNLWEARHFPNGNLSQLAAAVAGLGQPDAGLFTVSEAEC

SEQ ID NO: 543 - DNA, 2881 bp, Homo sapiens
  CDS (87)..(2783)
agctggggctccgggctgaggcgctaaagccgccctcccgcccgcggggccccgcgcccggcccgcccgcctgcccgcccgcggccatggccgtccggcccggcctgtggccagcgctcctgggcatagtcctcgccgcttggctccgcggctcgggtgcccagcagagtgccaccgtggccaacccagtgcctggtgccaacccggacctgcttccccacttcctggtggagcccgaggatgtgtacatcgtcaagaacaagccagtgctgcttgtgtgcaaggccgtgcccgccacgcagatcttcttcaagtgcaacggggagtgggtgcgccaggtggaccacgtgatcgagcgcagcacagacgggagcagtggtgagccgaccatggaggtccgcattaatgtctcaaggcagcaggtcgagaaggtgttcgggctggaggaatactggtgccagtgcgtggcatggagctcctcgggcaccaccaagagtcagaaggcctacatccgcatagccagattgcgcaagaacttcgagcaggagccgctggccaaggaggtgtccctggagcagggcatcgtgctgccctgccgtccaccggagggcatccctccagccgaggtggagtggctccggaacgaggacctggtggacccgtccctggaccccaatgtatacatcacgcgggagcacagcctggtggtgcgacaggcccgccttgctgacacggccaactacacctgcgtggccaagaacatcgtggcacgtcgccgcagcgcctccgctgctgtcatcgtctacgtgaacggtgggtggtcgacgtggaccgagtggtccgtctgcagcgccagctgtgggcgcggctggcagaaacggagccggagctgcaccaacccggcgcctctcaacgggggcgctttctgtgaggggcagaatgtccatgaccgcaccgtctcctctctgcttgtctctgtggacggcagctggagcccgtggagcaagtggtcggcctgtgggctggactgcacccactggcggagccgtgagtgctctgacccagcaccccgcaacggaggggaggagtgccagggcactgacctggacacccgcaactgtaccagtgacctctgtgtacacagtgcttctggccctgaggacgtggccctctatgtgggcctcatcgccgtggccgtctgcctggtcctgctgctgcttgtcctcatcctcgtttattgccggaagaaggaggggctggactcagatgtggctgactcgtccattctcacctcaggcttccagcccgtcagcatcaagcccagcaaagcagacaacccccatctgctcaccatccagccggacctcagcaccaccaccacctaccagggcagtctctgtccccggcaggatgggcccagccccaagttccagctcaccaatgggcacctgctcagccccctgggtggcggccgccacacactgcaccacagctctcccacctctgaggccgaggagttcgtctcccgcctctccacccagaactacttccgctccctgccccgaggcaccagcaacatgacctatgggaccttcaacttcctcgggggccggctgatgatccctaatacaggtatcagcctcctcatccccccagatgccataccccgagggaagatctatgagatctacctcacgctgcacaagccggaagacgtgaggttgcccctagctggctgtcagaccctgctgagtcccatcgttagctgtggaccccctggcgtcctgctcacccggccagtcatcctggctatggaccactgtggggagcccagccctgacagctggagcctgcgcctcaaaaagcagtcgtgcgagggcagctgggagcaggatgtgctgcacctgggcgaggaggcgccctcccacctctactactgccagctggaggccagtgcctgctacgtcttcaccgagcagctgggccgctttgccctggtgggagaggccctcagcgtggctgccgccaagcgcctcaagctgcttctgtttgcgccggtggcctgcacctccctcgagtacaacatccgggtctactgcctgcatgacacccacgatgcactcaaggaggtggtgcagctggagaagcagctggggggacagctgatccaggagccacgggtcctgcacttcaaggacagttaccacaacctgcgcctatccatccacgatgtgcccagctccctgtggaagagtaagctccttgtcagctaccaggagatccccttttatcacatctggaatggcacgcagcggtacttgcactgcaccttcaccctggagcgtgtcagccccagcactagtgacctggcctgcaagctgtgggtgtggcaggtggagggcggcgggcagagcttcagcatcaacttcaacatcaccaaggacacaaggtttgctgagctgctggctctggagagtgaagcgggggtcccagccctggtgggccccagtgccttcaagatccccttcctcattcggcagaagataatttccagcctggacccaccctgtaggcggggtgccgactggcggactctggcccagaaactccacctggacagccatctcagcttctttgcctccaagcccagccccacagccatgatcctcaacctgtgggaggcgcggcacttccccaacggcaacctcagccagctggctgcagcagtggctggactgggccagccagacgctggcctcttcacagtgtcggaggctgagtgctgaggccggccaggcccgacacctacactctcaccagctttggcacccaccaaggacaggcagaagccggacaggggcccttccccacaccggggaga

SEQ ID NO: 544 - protein, 899 aa, Homo sapiens
MAVRPGLWPALLGIVLAAWLRGSGAQQSATVANPVPGANPDLLPHFLVEPEDVYIVKNKPVLLVCKAVPATQIFFKCNGEWVRQVDHVIERSTDGSSGEPTMEVRINVSRQQVEKVFGLEEYWCQCVAWSSSGTTKSQKAYIRIARLRKNFEQEPLAKEVSLEQGIVLPCRPPEGIPPAEVEWLRNEDLVDPSLDPNVYITREHSLVVRQARLADTANYTCVAKNIVARRRSASAAVIVYVNGGWSTWTEWSVCSASCGRGWQKRSRSCTNPAPLNGGAFCEGQNVHDRTVSSLLVSVDGSWSPWSKWSACGLDCTHWRSRECSDPAPRNGGEECQGTDLDTRNCTSDLCVHSASGPEDVALYVGLIAVAVCLVLLLLVLILVYCRKKEGLDSDVADSSILTSGFQPVSIKPSKADNPHLLTIQPDLSTTTTYQGSLCPRQDGPSPKFQLTNGHLLSPLGGGRHTLHHSSPTSEAEEFVSRLSTQNYFRSLPRGTSNMTYGTFNFLGGRLMIPNTGISLLIPPDAIPRGKIYEIYLTLHKPEDVRLPLAGCQTLLSPIVSCGPPGVLLTRPVILAMDHCGEPSPDSWSLRLKKQSCEGSWEQDVLHLGEEAPSHLYYCQLEASACYVFTEQLGRFALVGEALSVAAAKRLKLLLFAPVACTSLEYNIRVYCLHDTHDALKEVVQLEKQLGGQLIQEPRVLHFKDSYHNLRLSIHDVPSSLWKSKLLVSYQEIPFYHIWNGTQRYLHCTFTLERVSPSTSDLACKLWVWQVEGGGQSFSINFNITKDTRFAELLALESEAGVPALVGPSAFKIPFLIRQKIISSLDPPCRRGADWRTLAQKLHLDSHLSFFASKPSPTAMILNLWEARHFPNGNLSQLAAAVAGLGQPDAGLFTVSEAEC

SEQ ID NO: 545 - DNA, 2881 bp, Homo sapiens
  CDS (87)..(2783)
agctggggctccgggctgaggcgctaaagccgccctcccgcccgcggggccccgcgcccggcccgcccgcctgcccgcccgcggccatggccgtccggcccggcctgtggccagcgctcctgggcatagtcctcgccgcttggctccgcggctcgggtgcccagcagagtgccaccgtggccaacccagtgcctggtgccaacccggacctgcttccccacttcctggtggagcccgaggatgtgtacatcgtcaagaacaagccagtgctgcttgtgtgcaaggccgtgcccgccacgcagatcttcttcaagtgcaacggggagtgggtgcgccaggtggaccacgtgatcgagcgcagcacagacgggagcagtggtgagccgaccatggaggtccgcattaatgtctcaaggcagcaggtcgagaaggtgttcgggctggaggaatactggtgccagtgcgtggcatggagctcctcgggcaccaccaagagtcagaaggcctacatccgcatagccagattgcgcaagaacttcgagcaggagccgctggccaaggaggtgtccctggagcagggcatcgtgctgccctgccgtccaccggagggcatccctccagccgaggtggagtggctccggaacgaggacctggtggacccgtccctggaccccaatgtatacatcacgcgggagcacagcctggtggtgcgacaggcccgccttgctgacacggccaactacacctgcgtggccaagaacatcgtggcacgtcgccgcagcgcctccgctgctgtcatcgtctacgtgaacggtgggtggtcgacgtggaccgagtggtccgtctgcagcgccagctgtgggcgcggctggcagaaacggagccggagctgcaccaacccggcgcctctcaacgggggcgctttctgtgaggggcagaatgtccatgaccgcaccgtctcctctctgcttgtctctgtggacggcagctggagcccgtggagcaagtggtcggcctgtgggctggactgcacccactggcggagccgtgagtgctctgacccagcaccccgcaacggaggggaggagtgccagggcactgacctggacacccgcaactgtaccagtgacctctgtgtacacagtgcttctggccctgaggacgtggccctctatgtgggcctcatcgccgtggccgtctgcctggtcctgctgctgcttgtcctcatcctcgtttattgccggaagaaggaggggctggactcagatgtggctgactcgtccattctcacctcaggcttccagcccgtcagcatcaagcccagcaaagcagacaacccccatctgctcaccatccagccggacctcagcaccaccaccacctaccagggcagtctctgtccccggcaggatgggcccagccccaagttccagctcaccaatgggcacctgctcagccccctgggtggcggccgccacacactgcaccacagctctcccacctctgaggccgaggagttcgtctcccgcctctccacccagaactacttccgctccctgccccgaggcaccagcaacatgacctatgggaccttcaacttcctcgggggccggctgatgatccctaatacaggtatcagcctcctcatccccccagatgccataccccgagggaagatctatgagatctacctcacgctgcacaagccggaagacgtgaggttgcccctagctggctgtcagaccctgctgagtcccatcgttagctgtggaccccctggcgtcctgctcacccggccagtcatcctggctatggaccactgtggggagcccagccctgacagctggagcctgcgcctcaaaaagcagtcgtgcgagggcagctgggagcaggatgtgctgcacctgggcgaggaggcgccctcccacctctactactgccagctggaggccagtgcctgctacgtcttcaccgagcagctgggccgctttgccctggtgggagaggccctcagcgtggctgccgccaagcgcctcaagctgcttctgtttgcgccggtggcctgcacctccctcgagtacaacatccgggtctactgcctgcatgacacccacgatgcactcaaggaggtggtgcagctggagaagcagctggggggacagctgatccaggagccacgggtcctgcacttcaaggacagttaccacaacctgcgcctatccatccacgatgtgcccagctccctgtggaagagtaagctccttgtcagctaccaggagatccccttttatcacatctggaatggcacgcagcggtacttgcactgcaccttcaccctggagcgtgtcagccccagcactagtgacctggcctgcaagctgtgggtgtggcaggtggagggcgacgggcagagcttcagcatcaacttcaacatcaccaaggacacaaggtttgctgagctgctggctctggagagtgaagcgggggtcccagccctggtgggccccagtgccttcaagatccccttcctcattcggcagaagataatttccagcctggacccaccctgtaggcggggtgccgactggcggactctggcccagaaactccacctggacagccatctcagcttctttgcctccaagcccagccccacagccatgatcctcaacctgcgggaggcgcggcacttccccaacggcaacctcagccagctggctgcagcagtggctggactgggccagccagacgctggcctcttcacagtgtcggaggctgagtgctgaggccggccaggcccgacacctacactctcaccagctttggcacccaccaaggacaggcagaagccggacaggggcccttccccacaccggggaga

SEQ ID NO: 546 - protein, 899 aa, Homo sapiens
MAVRPGLWPALLGIVLAAWLRGSGAQQSATVANPVPGANPDLLPHFLVEPEDVYIVKNKPVLLVCKAVPATQIFFKCNGEWVRQVDHVIERSTDGSSGEPTMEVRINVSRQQVEKVFGLEEYWCQCVAWSSSGTTKSQKAYIRIARLRKNFEQEPLAKEVSLEQGIVLPCRPPEGIPPAEVEWLRNEDLVDPSLDPNVYITREHSLVVRQARLADTANYTCVAKNIVARRRSASAAVIVYVNGGWSTWTEWSVCSASCGRGWQKRSRSCTNPAPLNGGAFCEGQNVHDRTVSSLLVSVDGSWSPWSKWSACGLDCTHWRSRECSDPAPRNGGEECQGTDLDTRNCTSDLCVHSASGPEDVALYVGLIAVAVCLVLLLLVLILVYCRKKEGLDSDVADSSILTSGFQPVSIKPSKADNPHLLTIQPDLSTTTTYQGSLCPRQDGPSPKFQLTNGHLLSPLGGGRHTLHHSSPTSEAEEFVSRLSTQNYFRSLPRGTSNMTYGTFNFLGGRLMIPNTGISLLIPPDAIPRGKIYEIYLTLHKPEDVRLPLAGCQTLLSPIVSCGPPGVLLTRPVILAMDHCGEPSPDSWSLRLKKQSCEGSWEQDVLHLGEEAPSHLYYCQLEASACYVFTEQLGRFALVGEALSVAAAKRLKLLLFAPVACTSLEYNIRVYCLHDTHDALKEVVQLEKQLGGQLIQEPRVLHFKDSYHNLRLSIHDVPSSLWKSKLLVSYQEIPFYHIWNGTQRYLHCTFTLERVSPSTSDLACKLWVWQVEGDGQSFSINFNITKDTRFAELLALESEAGVPALVGPSAFKIPFLIRQKIISSLDPPCRRGADWRTLAQKLHLDSHLSFFASKPSPTAMILNLREARHFPNGNLSQLAAAVAGLGQPDAGLFTVSEAEC

SEQ ID NO: 547 - DNA, 1887 bp, Homo sapiens
  CDS (1)..(1884)
atggccatcctcccgttgctcctgtgcctgctgccgctggcccctgcctcatccccaccccagtcagccacacccagcccatgtccccgccgctgccgctgccagacacagtcgctgcccctaagcgtgctgtgcccaggggcaggcctcctgttcgtgccaccctcgctggaccgccgggcagccgagctgcggctggcagacaacttcatcgcctccgtgcgccgccgcgacctggccaacatgacaggcctgctgcatctgagcctgtcgcggaacaccatccgccacgtggctgccggcgccttcgccgacctgcgggccctgcgtgccctgcacctggatggcaaccggctgacctcactgggcgagggccagctgcgcggcctggtcaacttgcgccacctcatcctcagcaacaaccagctggcagcgctggcggccggcgccctggatgattgtgccgagacactggaggacctcgacctctcctacaacaacctcgagcagctgccctgggaggccctgggccgcctgggcaacgtcaacacgttgggcctcgaccacaacctgctggcttctgtgcccgccggcgctttttcccgcctgcacaagctggcccggctggacatgacctccaaccgcctgaccacaatcccacccgacccactcttctcccgcctgcccctgctcgccaggccccggggctcgcccgcctctgccctggtgctggcctttggcgggaaccccctgcactgcaactgcgagctggtgtggctgcgtcgcctggcgcgggaggacgacctcgaggcctgcgcgtccccacctgctctgggcggccgctacttctgggcggtgggcgaggaggagtttgtctgcgagccgcccgtggtgactcaccgctcaccacctctggctgtgcccgcaggtcggccggctgccctgcgctgccgggcagtgggggacccagagccccgtgtgcgttgggtgtcaccccagggccggctgctaggcaactcaagccgtgcccgcgccttccccaatgggacgctggagctgctggtcaccgagccgggtgatggtggcatcttcacctgcattgcggccaatgcagctggcgaggccacagctgctgtggagctgactgtgggtcccccaccacctcctcagctagccaacagcaccagctgtgaccccccgcgggacggggatcctgatgctctcaccccaccctccgctgcctctgcttctgccaaggtggccgacactgggccccctaccgaccgtggcgtccaggtgactgagcacggggccacagctgctcttgtccagtggccggatcagcggcctatcccgggcatccgcatgtaccagatccagtacaacagctcggctgatgacatcctcgtctacaggatgatcccggcggagagccgctcgttcctgctgacggacctggcgtcaggccggacctacgatctgtgcgtgctcgccgtgtatgaggacagcgccacggggctcacggccacgcggcctgtgggctgcgcccgcttctccaccgaacctgcgctgcggccatgcggggcgccgcacgctcccttcctgggcggcacgatgatcatcgcgctgggcggcgtcatcgtagcctcggtactggtcttcatcttcgtgctgctaatgcgctacaaggtgcacggcggccagccccccggcaaggccaagattcccgcgcctgttagcagcgtttgctcccagaccaacggcgccctgggccccacgcccacgcccgccccgcccgccccggagcccgcggcgctcagggcccacaccgtggtccagctggactgcgagccctgggggcccggccacgaacctgtgggaccctag

SEQ ID NO: 548 - protein, 628 aa, Homo sapiens
MAILPLLLCLLPLAPASSPPQSATPSPCPRRCRCQTQSLPLSVLCPGAGLLFVPPSLDRRAAELRLADNFIASVRRRDLANMTGLLHLSLSRNTIRHVAAGAFADLRALRALHLDGNRLTSLGEGQLRGLVNLRHLILSNNQLAALAAGALDDCAETLEDLDLSYNNLEQLPWEALGRLGNVNTLGLDHNLLASVPAGAFSRLHKLARLDMTSNRLTTIPPDPLFSRLPLLARPRGSPASALVLAFGGNPLHCNCELVWLRRLAREDDLEACASPPALGGRYFWAVGEEEFVCEPPVVTHRSPPLAVPAGRPAALRCRAVGDPEPRVRWVSPQGRLLGNSSRARAFPNGTLELLVTEPGDGGIFTCIAANAAGEATAAVELTVGPPPPPQLANSTSCDPPRDGDPDALTPPSAASASAKVADTGPPTDRGVQVTEHGATAALVQWPDQRPIPGIRMYQIQYNSSADDILVYRMIPAESRSFLLTDLASGRTYDLCVLAVYEDSATGLTATRPVGCARFSTEPALRPCGAPHAPFLGGTMIIALGGVIVASVLVFIFVLLMRYKVHGGQPPGKAKIPAPVSSVCSQTNGALGPTPTPAPPAPEPAALRAHTVVQLDCEPWGPGHEPVGP

SEQ ID NO: 549 - DNA, 1887 bp, Homo sapiens; identical to SEQ ID NO: 547
  CDS (1)..(1884)

SEQ ID NO: 550 - protein, 628 aa, Homo sapiens; identical to SEQ ID NO: 548

SEQ ID NO: 551 - DNA, 1284 bp, Homo sapiens
  CDS (1)..(1275)
atggactctcttgttacagcaaacaccaaattttgctttgatctttttcaagagataggcaaagatgatcgtcataaaaacatatttttctctcccctgagcctctcagctgcccttggtatggtacgcttgggtgctagaagtgacagtgcacatcagattgatgaggtactacacttcgacgaattttcccagaatgaaagcaaagaacctgacccttgtctgaaaagcaacaaacaaaaagtgctggctgacagctctctggaggggcagaaaaaaacgacagagcctctggatcagcaggctgggtccttaaacaatgagagcggactggtcagctgctactttgggcagcttctctccaaattagacaggatcaagactgattacacactgagtattgccaacaggctttatggagagcaggaattcccaatctgtcaggaatacttagatggtgtgattcaattttaccacacgacgattgaaagtgttgatttccaaaaaaaccctgaaaaatccagacaagagattaacttctgggttgaatgtcaatcccaaggtaaaatcaaggaactcttcagcaaggacgctattaatgctgagactgtgctggtactggtgaatgctgtttacttcaaggccaaatgggaaacatactttgaccatgaaaacacggtggatgcacctttctgtctaaatgcgaatgaaaacaagagtgtgaagatgatgatgcaaaaaggcctctacagaattggcttcatagaggaggtgaaggcacagatcctggaaatgaggtacaccaaggggaagctcagcatgttcgtgctgctgccatctcactctaaagataacctgaagggtctggaagagcttgaaaggaaaatcacctatgaaaaaatggtggcctggagcagctcagaaaacatgtcagaagaatcggtggtcctgtccttcccccggttcaccctggaagacagctatgatctcaattccattttacaagacatgggcattacggatatctttgatgaaacgagggctgatcttactggaatctctccaagtcccaatttgtacttgtcaaaaattatccacaaaacctttgtggaggtggatgaaaacggtacccaggcagctgcagccactggggctgttgtctcggaaaggtcactacgatcttgggtggagtttaatgccaaccacccttttctctttttcattagacacaacaaaacccaaaccattctcttttatggaagggtctgctctccttaaaagggg

SEQ ID NO: 552 - protein, 425 aa, Homo sapiens
MDSLVTANTKFCFDLFQEIGKDDRHKNIFFSPLSLSAALGMVRLGARSDSAHQIDEVLHFDEFSQNESKEPDPCLKSNKQKVLADSSLEGQKKTTEPLDQQAGSLNNESGLVSCYFGQLLSKLDRIKTDYTLSIANRLYGEQEFPICQEYLDGVIQFYHTTIESVDFQKNPEKSRQEINFWVECQSQGKIKELFSKDAINAETVLVLVNAVYFKAKWETYFDHENTVDAPFCLNANENKSVKMMMQKGLYRIGFIEEVKAQILEMRYTKGKLSMFVLLPSHSKDNLKGLEELERKITYEKMVAWSSSENMSEESVVLSFPRFTLEDSYDLNSILQDMGITDIFDETRADLTGISPSPNLYLSKIIHKTFVEVDENGTQAAAATGAVVSERSLRSWVEFNANHPFLFFIRHNKTQTILFYGRVCSP

SEQ ID NO: 553 - DNA, 1200 bp, Homo sapiens
  CDS (7)..(1191)
tttacaatggactctcttgttacagcaaacaccaaattttgctttgatctttttcaagagataggcaaagatgatcgtcataaaaacatatttttctctcccctgagcctctcagctgcccttggtatggtacgcttgggtgctagaagtgacagtgcacatcagattgatgaggtactacacttcaacgaattttcccagaatgaaagcaaagaacctgctgggtccttaaacaatgagagcggactggtcagctgctactttgggcagcttctctccaaattagacaggatcaagactgattacacactgagtattgccaacaggctttatggagagcaggaattcccaatctgtcaggaatacttagatggtgtgattcaattttaccacacgacgattgaaagtgttgatttccaaaaaaaccctgaaaaatccagacaagagattaacttctgggttgaatgtcaatcccaaggtaaaatcaaggacctcttcagcaaggacgctattaatgctgagactgtgctggtactggtgaatgctgtttacttcaaggccaaatgggaaacatactttgaccatgaaaacacggtggatgcacctttctgtctaaatcagaatgaaaacaagagtgtgaagatgatgacgcaaaaaggcctctacagaattggcttcatagaggaggtgaaggcacagatcctggaaatgaggtacaccaaggggaagctcagcatgttcgtgctgctgccatctcactctaaagataacctgaagggtctggaagagcttgaaaggaaaatcacctatgaaaaaatggtggcctggagcagctcagaaaacatgtcagaagaatcggtggtcctgtccttcccccggttcaccctggaagacagctatgatctcaattccattttacaagacatgggcattacggatatctttgatgaaacgagggctgatcttactggaatctctccaagtcccaatttgtacttgtcaaaaattatccacaaaacctttgtggaggtggatgaaaacggtacccaggcagctgcagccactggggctgttgtctcggaaaggtcactacgatcttgggtggagtttaatgccaaccacccttttctctttttcattagacacaacaaaacccaaaccattctcttttatggcagggtctgctctccttaaaagggg

SEQ ID NO: 554 - protein, 395 aa, Homo sapiens
MDSLVTANTKFCFDLFQEIGKDDRHKNIFFSPLSLSAALGMVRLGARSDSAHQIDEVLHFNEFSQNESKEPAGSLNNESGLVSCYFGQLLSKLDRIKTDYTLSIANRLYGEQEFPICQEYLDGVIQFYHTTIESVDFQKNPEKSRQEINFWVECQSQGKIKDLFSKDAINAETVLVLVNAVYFKAKWETYFDHENTVDAPFCLNQNENKSVKMMTQKGLYRIGFIEEVKAQILEMRYTKGKLSMFVLLPSHSKDNLKGLEELERKITYEKMVAWSSSENMSEESVVLSFPRFTLEDSYDLNSILQDMGITDIFDETRADLTGISPSPNLYLSKIIHKTFVEVDENGTQAAAATGAVVSERSLRSWVEFNANHPFLFFIRHNKTQTILFYGRVCSP

SEQ ID NO: 555 - DNA, 1278 bp, Homo sapiens
  CDS (1)..(1278)
accatggactctcttgttacagcaaacaccaaattttgctttgatctttttcaagagataggcaaagatgatcgtcataaaaacatatttttctctcccctgagcctctcagctgcccttggtatggtacgcttgggtgctagaagtgacagtgcacatcagattgatgaggtactacacttcaacgaattttcccagaatgaaagcaaagaacctgacccttgtctgaaaagcaacaaacaaaaagtgctggctgacagctctctggaggggcagaaaaaaacgacagagcctctggatcagcaggctgggtccttaaacaatgagagcggactggtcagctgctactttgggcagcttctctccaaattagacaggatcaagactgattacacactgagtattgccaacaggctttatggagggcaggaattcccaatctgtcaggaatacttagatggtgtgattcaattttaccacacgacgattgaaagtgttgatttccaaaaaaaccctgaaaaatccagacaagagattaacttctgggttgaatgtcaatcccaaggtaaaatcaaggaactcttcagcaaggacgctattaatgctgagactgtgctggtactggtgaatgctgtttacttcaaggccaaatgggaaacatactttgaccatgaaaacacggtggatgcacctttctgtctaaatgcgaatgaaaacaagagtgtgaagatgatgacgcaaaaaggcctctacagaattggcttcatagaggaggtgaaggcacagatcctggaaatgaggtacaccaaggggaagctcagcatgttcgtgctgctgccatctcactctaaagataacctgaagggtctggaagagcttgaaaggaaaatcacctatgaaaaaatggtggcctggagcagctcagaaaacatgtcagaagaatcggtggtcctgtccttcccccggttcaccctggaagacagctatgatctcaattccattttacaagacatgggcattacggatatctttgatgaaacgagggctgatcttactggaatctctccaagtcccaatttgtacttgtcaaaaattatccacaaaacctttgtggaggtggatgaaaacggtacccaggcagctgcagccactggggctgttgtctcggaaaggtcactacgatcttgggtggagtttaatgccaaccacccttttctctttttcattagacacaacaaaacccaaaccattctcttttatggcagggtctgctctcct

SEQ ID NO: 556 - protein, 426 aa, Homo sapiens
TMDSLVTANTKFCFDLFQEIGKDDRHKNIFFSPLSLSAALGMVRLGARSDSAHQIDEVLHFNEFSQNESKEPDPCLKSNKQKVLADSSLEGQKKTTEPLDQQAGSLNNESGLVSCYFGQLLSKLDRIKTDYTLSIANRLYGGQEFPICQEYLDGVIQFYHTTIESVDFQKNPEKSRQEINFWVECQSQGKIKELFSKDAINAETVLVLVNAVYFKAKWETYFDHENTVDAPFCLNANENKSVKMMTQKGLYRIGFIEEVKAQILEMRYTKGKLSMFVLLPSHSKDNLKGLEELERKITYEKMVAWSSSENMSEESVVLSFPRFTLEDSYDLNSILQDMGITDIFDETRADLTGISPSPNLYLSKIIHKTFVEVDENGTQAAAATGAVVSERSLRSWVEFNANHPFLFFIRHNKTQTILFYGRVCSP

SEQ ID NO: 557 - DNA, 1285 bp, Homo sapiens
  CDS (8)..(1276)
ttttacaatggactctcttgttacagcaaacaccaaattttgctttgatctttttcaagagataggcaaagatgatcgtcataaaaacatatttttctctcccctgagcctctcagctgcccttggtatggtacgcttgggtgctataagtgacagtgcacatcacattgatgaggtacgtgtccactattcccagaatgaaagcaaagaacctgacccttgtctgaaaagcaacaaacaaaaagtgctggctgacagctctctggaggggcagaaaaaaacgacagagcctctggatcagcaggctgggtccttaaacaatgggagcggactggtcagctgctactttgggcagcttctctccaaattagacaggatcaagactgattacacactgagtattgccgacaggctttatggagagcgggaattcccaatctgtcaggaatacttagatggtgtgattcaattttaccacacgacgattgaaagtgttgatttccaaaaaaaccctgaaaaatccagacaagagattaacttctgggttgaatgtcaatcccaaggtaaaatcaaggaactcttcagcaaggacgctattaatgctgagactgtgctggtactggtgaatgctgtttacttcaaggccaaatgggaaacatactttgaccatgaaaacacggtggatgcacctttctgtctaaatgcgaatgaaaacaagagtgtgaagatgatgacgcaaaaaggcctctacagaattggcttcatagaggaggtgaaggcacagatcctggaaatgaggtacaccaaggggaagctcagcatgttcgtgctgctgccatctcactctaaagataacctgaagggtctggaagagcttgaaaggaaaatcacctatgaaaaaatggtggcctggagcagctcagaaaacatgtcagaagaatcggtggtcctgtccttcccccggttcaccctggaagacagctatgatctcaattccattttacaagacatgggcattacggatatctttgatgaaacgagggctgatcttactggaatctctccaagtcccaatttgtacttgtcaaaaattatccacaaaacctttgtggaggtggatgaaaacggtacccaggcagctgcagccactggggctgttgtctcggaaaggtcactacgatcttgggtggagtttaatgccaaccacccttttctctttttcattagacacaacaaaacccaaaccattctcttttatggaagggtctgctctccttaaaagggg

SEQ ID NO: 558 - protein, 423 aa, Homo sapiens
MDSLVTANTKFCFDLFQEIGKDDRHKNIFFSPLSLSAALGMVRLGAISDSAHHIDEVRVHYSQNESKEPDPCLKSNKQKVLADSSLEGQKKTTEPLDQQAGSLNNGSGLVSCYFGQLLSKLDRIKTDYTLSIADRLYGEREFPICQEYLDGVIQFYHTTIESVDFQKNPEKSRQEINFWVECQSQGKIKELFSKDAINAETVLVLVNAVYFKAKWETYFDHENTVDAPFCLNANENKSVKMMTQKGLYRIGFIEEVKAQILEMRYTKGKLSMFVLLPSHSKDNLKGLEELERKITYEKMVAWSSSENMSEESVVLSFPRFTLEDSYDLNSILQDMGITDIFDETRADLTGISPSPNLYLSKIIHKTFVEVDENGTQAAAATGAVVSERSLRSWVEFNANHPFLFFIRHNKTQTILFYGRVCSP

SEQ ID NO: 559 - DNA, 1196 bp, Homo sapiens
  CDS (60)..(1154)
ccaatcaccattttctctttctcctttttttttggttttagatcgttataagttttacaatggactctcttgttacagcaaacaccaaattttgctttgatctttttcaagagataggcaaagatgatcgtcataaaaacatatttttctctcccctgagcctctcagctgcccttggtatggtacgcttgggtgctagaagtgacagtgcacatcagattgatgaggtacgttccttaaacaatgagagcggactggtcagctgctactttgggcagcttctctccaaattagacaggatcaagactgattacacactgagtattgccaacaggctttatggagagtccagcctgggagacaagagcgaaactctgtctcaaaaaaaaaaaaaaaaaattatctacacaaatgcttttgatacaattcatactcaggatattctctgggatctttttttaggtaaaatcaaggaactcttcagcaaggacgctattaatgctgagactgtgctggtactggtgaatgctgtttacttcaaggccaaatgggaaacatactttgaccatgaaaacacggtggatgcacctttctgtctaaatcagaatgaaaacaagagtgtgaagatgatgacgcaaaaaggcctctacagaattggcttcatagaggaggtgaaggcacagatcctggaaatgaggtacaccaaggggaagctcagcatgttcgtgctgctgccatctcactctaaagataacctgaagggtatcacctatgaaaaaatggtggcctggagcagctcagaaaacatgtcagaagaatcggtggtcctgtccttcccccggttcaccctggaagacagctatgatctcaattccattttacaagacatgggcattacggatatctttgatgaaacgagggctgatcttactggaatctctccaagtcccaatttgtacttgtcaaaaattatccacaaaacctttgtggaggtggatgaaaacggtacccaggcagctgcagccactggggctgttgtctcggaaaggtcactacgatcttgggtggagtttaatgccaaccacccttttctctttttcattagacacaacaaaacccaaaccattctcttttatggcagggtctgctctccttaaaaggggagcagtgtctagtactttggagctggaggaaaa

SEQ ID NO: 560 - protein, 365 aa, Homo sapiens
MDSLVTANTKFCFDLFQEIGKDDRHKNIFFSPLSLSAALGMVRLGARSDSAHQIDEVRSLNNESGLVSCYFGQLLSKLDRIKTDYTLSIANRLYGESSLGDKSETLSQKKKKKIIYTNAFDTIHTQDILWDLFLGKIKELFSKDAINAETVLVLVNAVYFKAKWETYFDHENTVDAPFCLNQNENKSVKMMTQKGLYRIGFIEEVKAQILEMRYTKGKLSMFVLLPSHSKDNLKGITYEKMVAWSSSENMSEESVVLSFPRFTLEDSYDLNSILQDMGITDIFDETRADLTGISPSPNLYLSKIIHKTFVEVDENGTQAAAATGAVVSERSLRSWVEFNANHPFLFFIRHNKTQTILFYGRVCSP

SEQ ID NO: 561 - DNA, 339 bp, Homo sapiens
  CDS (1)..(336)
atgagcccctttggcagtctggcgaagctcttgggtccttctcagattgcatggtggtgcatcacgaccctgtgctgttttccagagaggtatgctggacgggaccataacagctgcaaactctcccagagggggttcctaaacttcatgaacactgtactggttgccttcacaaagaaccagaagggctctggtgcccttgactgcatgatgaagaaactggacttcaactgtgatgggcagctagattttcaggactttctcagtcttactgatggtgtagctgtggcttgccctgactccttcatcccggctggccatgcccatgagagaatctga

SEQ ID NO: 562 - protein, 112 aa, Homo sapiens
MSPFGSLAKLLGPSQIAWWCITTLCCFPERYAGRDHNSCKLSQRGFLNFMNTVLVAFTKNQKGSGALDCMMKKLDFNCDGQLDFQDFLSLTDGVAVACPDSFIPAGHAHERI

SEQ ID NO: 563 - DNA, 348 bp, Homo sapiens
  CDS (5)..(340)
tgccatgagcccctttggcagtctggcgaagctcttgggtccttctcagattgcatggtggtgcatcacgacctgtgctgttttccagagagggtatgctggacgggaccataacagctgcaaactctcccagagggggttcctaaacttcatgaacactgtactggttgccttcacaaagaaccagaagggctctggtgcccttgactgcatgatgaagaaactggacttcaactgtgatgggcagctagattttcaggactttctcagtcttactgatggtgtagctgtggcttgccctgactccttcatcccggctggccatgcccatgagagaatctgaggtgc

SEQ ID NO: 564 - protein, 112 aa, Homo sapiens
MSPFGSLAKLLGPSQIAWWCITTCAVFQRGYAGRDHNSCKLSQRGFLNFMNTVLVAFTKNQKGSGALDCMMKKLDFNCDGQLDFQDFLSLTDGVAVACPDSFIPAGHAHERI

SEQ ID NO: 565 - DNA, 1722 bp, Homo sapiens
  CDS (1)..(1590)
atgaagctgtggattcatctcttttattcatctctccttgcctgtatatctttacactcccaaactccagtgctctcatccagaggctcttgtgattctctttgcaattgtgaggaaaaagatggcacaatgctaataaattgtgaagcaaaaggtatcaagatggtatctgaaataagtgtgccaccatcacgacctttccaactaagcttattaaataacggcttgacgatgcttcacacaaatgacttttctgggcttaccaatgctatttcaatacaccttggatttaacaatattgcagatattgagataggtgcatttaatggccttggcctcctgaaacaacttcatatcaatcacaattctttagaaattcttaaagaggatactttccatggactggaaaacctggaattcctgcaagcagataacaattttatcacagtgattgaaccaagtgcctttagcaagctcaacagactcaaagtgttaattttaaatgacaatgctattgagagtcttcctccaaacatcttccgatttgttcctttaacccatctagatcttcgtggaaatcaattacaaacattgccttatgttggttttctcgaacacattggccgaatattggatcttcagttggaggacaacaaatgggcctgcaattgtgacttattgcagttaaaaacttggttggagaacatgcctccacagtctataattggtgatgttgtctgcaacagccctccattttttaaaggaagtatactcagtagactaaagaaggaatctatttgccctactccaccagtgtatgaagaacatgaggatccttcaggatcattacatctggcagcaacatcttcaataaatgatagtcgcatgtcaactaagaccacgtccattctaaaactacccaccaaagcaccaggtttgataccttatattacaaagccatccactcaacttccaggaccttactgccctattccttgtaactgcaaagtcctatccccatcaggacttctaatacattgtcaggagcgcaacattgaaagcttatcagatctgagacctcctccgcaaaatcctagaaagctcattctagcgggaaatattattcacagtttaatgaagagtccatcctttggtccaaagcatctggaagaggaagaagagaggaatgagaaagaaggaagtgatgcaaaacatctccaaagaagtcttttggaacaggaaaatcattcaccactcacagggtcaaatatgaaatacaaaaccacgaaccaatcaacagaatttttatccttccaagatgccagctcattgtacagaaacattttagaaaaagaaagggaacttcagcaactgggaatcacagaatacctaaggaaaaacattgctcagctccagcctgatatggaggcacattatcctggagcccacgaagagctgaagttaatggaaacattaatgtactcacgtccaaggaaggtattagtggaacagacaaaaaatgagtattttgaacttaaagctaatttacatgctgaacctgactatttagaagtcctggagcagcaaacatagatggagagtttgagggctttcgcagaaatgctgtgattctgttttaagtccataccttgtaaattagtgccttacgtgagtgtgtcatccatcagaacctaagcacagcagtaaactatggagaaaaaa

SEQ ID NO: 566 - protein, 530 aa, Homo sapiens
MKLWIHLFYSSLLACISLHSQTPVLSSRGSCDSLCNCEEKDGTMLINCEAKGIKMVSEISVPPSRPFQLSLLNNGLTMLHTNDFSGLTNAISIHLGFNNIADIEIGAFNGLGLLKQLHINHNSLEILKEDTFHGLENLEFLQADNNFITVIEPSAFSKLNRLKVLILNDNAIESLPPNIFRFVPLTHLDLRGNQLQTLPYVGFLEHIGRILDLQLEDNKWACNCDLLQLKTWLENMPPQSIIGDVVCNSPPFFKGSILSRLKKESICPTPPVYEEHEDPSGSLHLAATSSINDSRMSTKTTSILKLPTKAPGLIPYITKPSTQLPGPYCPIPCNCKVLSPSGLLIHCQERNIESLSDLRPPPQNPRKLILAGNIIHSLMKSPSFGPKHLEEEEERNEKEGSDAKHLQRSLLEQENHSPLTGSNMKYKTTNQSTEFLSFQDASSLYRNILEKERELQQLGITEYLRKNIAQLQPDMEAHYPGAHEELKLMETLMYSRPRKVLVEQTKNEYFELKANLHAEPDYLEVLEQQT

SEQ ID NO: 567 - DNA, 2058 bp, Homo sapiens
  CDS (1)..(1926)
atgaagctgtggattcatctcttttattcatctctccttgcctgtatatctttacactcccaaactccagtgctctcatccagaggctcttgtgattctctttgcaattgtgaggaaaaagatggcacaatgctaataaattgtgaagcaaaaggtatcaagatggtatctgaaataagtgtgccaccatcacgacctttccaactaagcttattaaataacggcttgacgatgcttcacacaaatgacttttctgggcttaccaatgctatttcaatacaccttggatttaacaatattgcagatattgagataggtgcatttaatggccttggcctcctgaaacaacttcatatcaatcacaattctttagaaattcttaaagaggatactttccatggactggaaaacctggaattcctgcaagcagataacaattttatcacagtgattgaaccaagtgcctttagcaagctcaacagactcaaagtgttaattttaaatgacaatgctattgagagtcttcctccaaacatcttccgatttgttcctttaacccatctagatcttcgtggaaatcaattacaaacattgccttatgttggttttctcgaacacattggccgaatattggatcttcagttggaggacaacaaatgggcctgcaattgtgacttattgcagttaaaaacttggttggagaacatgcctccacagtctataattggtgatgttgtctgcaacagccctccattttttaaaggaagtatactcagtagactaaagaaggaatctatttgccctactccaccagtgtatgaagaacatgaggatccttcaggatcattacatctggcagcaacatcttcaataaatgatagtcgcatgtcaactaagaccacgtccattctaaaactacccaccaaagcaccacagattgaccttgaggataacccctgggactgctcctgtgacctggttggactgcagcaatggatacaaaagttaagcaagaacacagtgacagatgacatcctctgcacttcccccgggcatctcgacaaaaaggaattgaaagccctaaatagtgaaattctctgtccaggtttagtaaataacccatccatgccaacacagactagttaccttatggtcaccactcctgcaacaacaacaaatacggctgatactattttacgatctcttacggacgctgtgccactgtctgttctaatattgggacttctgattatgttcatcactattgttttctgtgctgcagggatagtggttcttgttcttcaccgcaggagaagatacaaaaagaaacaagtagatgagcaaatgagagacaacagtcctgtgcatcttcagtacagcatgtatggccataaaaccactcatcacactactgaaagaccctctgcctcactctatgaacagcacatggtgagccccatggttcatgtctatagaagtccatcctttggtccaaagcatctggaagaggaagaagagaggaatgagaaagaaggaagtgatgcaaaacatctccaaagaagtcttttggaacaggaaaatcattcaccactcacagggtcaaatatgaaatacaaaaccacgaaccaatcaacagaatttttatccttccaagatgccagctcattgtacagaaacattttagaaaaagaaagggaacttcagcaactgggaatcacagaatacctaaggaaaaacattgctcagctccagcctgatatggaggcacattatcctggagcccacgaagagctgaagttaatggaaacattaatgtactcacgtccaaggaaggtattagtggaacagacaaaaaatgagtattttgaacttaaagctaatttacatgctgaacctgactatttagaagtcctggagcagcaaacatagatggagagtttgagggctttcgcagaaatgctgtgattctgttttaagtccataccttgtaaattagtgccttacgtgagtgtgtcatccatcagaacctaagcacagcagtaaactatggagaaaaaa

SEQ ID NO: 568 - protein, 642 aa, Homo sapiens
MKLWIHLFYSSLLACISLHSQTPVLSSRGSCDSLCNCEEKDGTMLINCEAKGIKMVSEISVPPSRPFQLSLLNNGLTMLHTNDFSGLTNAISIHLGFNNIADIEIGAFNGLGLLKQLHINHNSLEILKEDTFHGLENLEFLQADNNFITVIEPSAFSKLNRLKVLILNDNAIESLPPNIFRFVPLTHLDLRGNQLQTLPYVGFLEHIGRILDLQLEDNKWACNCDLLQLKTWLENMPPQSIIGDVVCNSPPFFKGSILSRLKKESICPTPPVYEEHEDPSGSLHLAATSSINDSRMSTKTTSILKLPTKAPQIDLEDNPWDCSCDLVGLQQWIQKLSKNTVTDDILCTSPGHLDKKELKALNSEILCPGLVNNPSMPTQTSYLMVTTPATTTNTADTILRSLTDAVPLSVLILGLLIMFITIVFCAAGIVVLVLHRRRRYKKKQVDEQMRDNSPVHLQYSMYGHKTTHHTTERPSASLYEQHMVSPMVHVYRSPSFGPKHLEEEEERNEKEGSDAKHLQRSLLEQENHSPLTGSNMKYKTTNQSTEFLSFQDASSLYRNILEKERELQQLGITEYLRKNIAQLQPDMEAHYPGAHEELKLMETLMYSRPRKVLVEQTKNEYFELKANLHAEPDYLEVLEQQT

SEQ ID NO: 569 - DNA, 2397 bp, Homo sapiens
  CDS (1)..(2394)
atgctaataaattgtgaagcaaaaggtatcaagatggtatctgaaataagtgtgccaccatcacgacctttccaactaagcttattaaataacggcttgacgatgcttcacacaaatgacttttctgggcttaccaatgctatttcaatacaccttggatttaacaatattgcagatattgagataggtgcatttaatggccttggcctcctgaaacaacttcatatcaatcacaattctttagaaattcttaaagaggatactttccatggactggaaaacctggaattcctgcaagcagataacaattttatcacagtgattgaaccaagtgcctttagcaagctcaacagactcaaagtgttaattttaaatgacaatgctattgagagtcttcctccaaacatcttccgatttgttcctttaacccatctagatcttcgtggaaatcaattacaaacattgccttatgttggttttctcgaacacattggccgaatattggatcttcagttggaggacaacaaatgggcctgcaattgtgacttattgcagttaaaaacttggttggagaacatgcctccacagtctataattggtgatgttgtctgcaacagccctccattttttaaaggaagtatactcagtagactaaagaaggaatctatttgccctactccaccagtgtatgaagaacatgaggatccttcaggatcattacatctggcagcaacatcttcaataaatgatagtcgcatgtcaactaagaccacgtccattctaaaactacccaccaaagcaccaggtttgataccttatattacaaagccatccactcaacttccaggaccttactgccctattccttgtaactgcaaagtcctatccccatcaggacttctaatacattgtcaggagcgcaacattgaaagcttatcagatctgagacctcctccgcaaaatcctagaaagctcattctagcgggaaatattattcacagtttaatgaagtctgatctagtggaatatttcactttggaaatgcttcacttgggaaacaatcgtattgaagttcttgaagaaggatcgtttatgaacctaacgagattacaaaaactctatctaaatggtaaccacctgaccaaattaagtaaaggcatgttccttggtctccataatcttgaatacttatatcttgaatacaatgccattaaggaaatactgccaggaacctttaatccaatgcctaaacttaaagtcctgtatttaaataacaacctcctccaagttttaccaccacatattttttcaggggttcctctaactaaggtaaatcttaaaacaaaccagtttacccatctacctgtaagtaatattttggatgatcttgatttgctaacccagattgaccttgaggataacccctgggactgctcctgtgacctggttggactgcagcaatggatacaaaagttaagcaagaacacagtgacagatgacatcctctgcacttcccccgggcatctcgacaaaaaggaattgaaagccctaaatagtgaaattctctgtccaggtttagtaaataacccatccatgccaacacagactagttaccttatggtcaccactcctgcaacaacaacaaatacggctgatactattttacgatctcttacggacgctgtgccactgtctgttctaatattgggacttctgattatgttcatcactattgttttctgtgctgcagggatagtggttcttgttcttcaccgcaggagaagatacaaaaagaaacaagtagatgagcaaatgagagacaacagtcctgtgcatcttcagtacagcatgtatggccataaaaccactcatcacactactgaaagaccctctgcctcactctatgaacagcacatggtgagccccatggttcatgtctatagaagtccatcctttggtccaaagcatctggaagaggaagaagagaggaatgagaaagaaggaagtgatgcaaaacatctccaaagaagtcttttggaacaggaaaatcattcaccactcacagggtcaaatatgaaatacaaaaccacgaaccaatcaacagaatttttatccttccaagatgccagctcattgtacagaaacattttagaaaaagaaagggaacttcagcaactgggaatcacagaatacctaaggaaaaacattgctcagctccagcctgatatggaggcacattatcctggagcccacgaagagctgaagttaatggaaacattaatgtactcacgtccaaggaaggtattagtggaacagacaaaaaatgagtattttgaacttaaagctaatttacatgctgaacctgactatttagaagtcctggagcagcaaacatag

SEQ ID NO: 570 - protein, 798 aa, Homo sapiens [sequence omitted]

SEQ ID NO: 571 - DNA, 990 bp, Homo sapiens
  CDS (1)..(990)
cgcggtaccccctgggactgctcctgtgacctggttggactgcagcaatggatacaaaagttaagcaagaacacagtgacagatgacatcctctgcacttcccccgggcatctcgacaaaaaggaattgaaagccctaaatagtgaaattctctgtccaggtttagtaaataacccatccatgccaacacagactagttaccttatggtcaccactcctgcaacaacaacaaatacggctgatactattttacgatctcttacggacgctgtgccactgtctgttctaatattgggacttctgattatgttcatcactattgttttctgtgctgcagggatagtggttcttgttcttcaccgcaggagaagatacaaaaagaaacaagtagatgagcaaatgagagacaacagtcctgtgcatcttcagtacagcatgtatggccataaaaccactcatcacactactgaaagaccctctgcctcactctatgaacagcacatggtgagccccatggttcatgtctatagaagtccatcctttggtccaaagcatctggaagaggaagaagagaggaatgagaaagaaggaagtgatgcaaaacatctccaaagaagtcttttggaacaggaaaatcattcaccactcacagggtcaaatatgaaatacaaaaccacgaaccaatcaacagaatttttatccttccaagatgccagctcattgtacagaaacattttagaaaaagaaagggaacttcagcaactgggaatcacagaatacctaaggaaaaacattgctcagctccagcctgatatggaggcacattatcctggagcccacgaagagctgaagttaatggaaacattaatgtactcacgtccaaggaaggtattagtggaacagacaaaaaatgagtattttgaacttaaagctaatttacatgctgaacctgactatttagaagtcctggagcagcaaacactcgaggcg

SEQ ID NO: 572 - protein, 330 aa, Homo sapiens
RGTPWDCSCDLVGLQQWIQKLSKNTVTDDILCTSPGHLDKKELKALNSEILCPGLVNNPSMPTQTSYLMVTTPATTTNTADTILRSLTDAVPLSVLILGLLIMFITIVFCAAGIVVLVLHRRRRYKKKQVDEQMRDNSPVHLQYSMYGHKTTHHTTERPSASLYEQHMVSPMVHVYRSPSFGPKHLEEEEERNEKEGSDAKHLQRSLLEQENHSPLTGSNMKYKTTNQSTEFLSFQDASSLYRNILEKERELQQLGITEYLRKNIAQLQPDMEAHYPGAHEELKLMETLMYSRPRKVLVEQTKNEYFELKANLHAEPDYLEVLEQQTLEA

SEQ ID NO: 573 - DNA, 1648 bp, Homo sapiens
  CDS (2)..(1648)
cacctcgcgaaccatgctaataaattgtgaagcaaaaggtatcaagatggtatctgaaataagtgtgccaccatcacgacctttccaactaagcttattaaataacggcttgacgatgcttcacacaaatgacttttctgggcttaccaatgctatttcaatacaccttggatttaacaatattgcagatattgagataggtgcatttaatggccttggcctcctgaaacaacttcatatcaatcacaattctttagaaattcttaaagaggatactttccatggactggaaaacctggaattcctgcaagcagataacaattttatcacagtgattgaaccaagtgcctttagcaagctcaacagactcaaagtgttaattttaaatgacaatgctattgagagtcttcctccaaacatcttccgatttgttcctttaacccatctagatcttcgtggaaatcaattacaaacattgccttatgttggttttctcgaacacattggccgaatattggatcttcagttggaggacaacaaatgggcctgcaattgtgacttattgcagttaaaaacttggttggagaacatgcctccacagtctataattggtgatgttgtctgcaacagccctccattttttaaaggaagtatactcagtagactaaagaaggaatctatttgccctactccaccagtgtatgaagaacatgaggatccttcaggatcattacatctggcagcaacatcttcaataaatgatagtcgcatgtcaactaagaccacgtccattctaaaactacccaccaaagcaccaggtttgataccttatattacaaagccatccactcaacttccaggaccttactgccctattccttgtaactgcaaagtcctatccccatcaggacttctaatacattgtcaggagcgcaacattgaaagcttatcagatctgagacctcctccgcaaaatcctagaaagctcattctagcgggaaatattattcacagtttaatgaagtctgatctagtggaatatttcactttggaaatgcttcacttgggaaacaatcgtattgaagttcttgaagaaggatcgtttatgaacctaacgagattacaaaaactctatctaaatggtaaccacctgaccaaattaagtaaaggcatgttccttggtctccataatcttgaatacttatatcttgaatacaatgccattaaggaaatactgccaggaacctttaatccaatgcctaaacttaaagtcctgtatttaaataacaacctcctccaagttttaccaccacatattttttcaggggttcctctaactaaggtaaatcttaaaacaaaccagtttacccatctacctgtaagtaatattttggatgatcttgatttactaacccagattgaccttgaggataacccctgggactgctcctgtgacctggttggactgcagcaatggatacaaaagttaagcaagaacacagtgacagatgacatcctctgcacttcccccgggcatctcgacaaaaaggaattgaaagccctaaatagtgaaattctctgtccaggtttagtaaataacccatccatgccaacacagactagttaccttatggtcaccgtcgacggc

SEQ ID NO: 574 - protein, 549 aa, Homo sapiens
TSRTMLINCEAKGIKMVSEISVPPSRPFQLSLLNNGLTMLHTNDFSGLTNAISIHLGFNNIADIEIGAFNGLGLLKQLHINHNSLEILKEDTFHGLENLEFLQADNNFITVIEPSAFSKLNRLKVLILNDNAIESLPPNIFRFVPLTHLDLRGNQLQTLPYVGFLEHIGRILDLQLEDNKWACNCDLLQLKTWLENMPPQSIIGDVVCNSPPFFKGSILSRLKKESICPTPPVYEEHEDPSGSLHLAATSSINDSRMSTKTTSILKLPTKAPGLIPYITKPSTQLPGPYCPIPCNCKVLSPSGLLIHCQERNIESLSDLRPPPQNPRKLILAGNIIHSLMKSDLVEYFTLEMLHLGNNRIEVLEEGSFMNLTRLQKLYLNGNHLTKLSKGMFLGLHNLEYLYLEYNAIKEILPGTFNPMPKLKVLYLNNNLLQVLPPHIFSGVPLTKVNLKTNQFTHLPVSNILDDLDLLTQIDLEDNPWDCSCDLVGLQQWIQKLSKNTVTDDILCTSPGHLDKKELKALNSEILCPGLVNNPSMPTQTSYLMVTVDG

SEQ ID NO: 575 - DNA, 1887 bp, Homo sapiens
  CDS (1)..(1887)
cgcggtaccaaatgggcctgcaattgtgacttattgcagttaaaaacttggttggagaacatgcctccacagtctataattggtgatgttgtctgcaacagccctccattttttaaaggaagtatactcagtagactaaagaaggaatctatttgccctactccaccagtgtatgaagaacatgaggatccttcaggatcattacatctggcagcaacatcttcaataaatgatagtcgcatgtcaactaagaccacgtccattctaaaactacccaccaaagcaccaggtttgataccttatattacaaagccatccactcaacttccaggaccttactgccctattccttgtaactgcaaagtcctatccccatcaggacttctaatacattgtcaggagcgcaacattgaaagcttatcagatctgagacctcctccgcaaaatcctagaaagctcattctagcgggaaatattattcacagtttaatgaagtctgatctagtggaatatttcactttggaaatgcttcacttgggaaacaatcgtattgaagttcttgaagaaggatcgtttatgaacctaacgagattacaaaaactctatctaaatggtaaccacctgaccaaattaagtaaaggcatgttccttggtctccataatcttgaatacttatatcttgaatacaatgccattaaggaaatactgccaggaacctttaatccaatgcctaaacttaaagtcctgtatttaaataacaacctcctccaagttttaccaccacatattttttcaggggttcctctaactaaggtaaatcttaaaacaaaccagtttacccatctacctgtaagtaatattttggatgatcttgatttgctaacccagattgaccttgaggataacccctgggactgctcctgtgacctggttggactgcagcaatggatacaaaagttaagcaagaacacagtgacagatgacatcctctgcacttcccccgggcatctcgacaaaaaggaattgaaagccctaaatagtgaaattctctgtccaggtttagtaaataacccatccatgccaacacagactagttaccttatggtcaccactcctgcaacaacaacaaatacggctgatactattttacgatctcttacggacgctgtgccactgtctgttctaatattgggacttctgattatgttcatcactattgttttctgtgctgcagggatagtggttcttgttcttcaccgcaggagaagatacaaaaagaaacaagtagatgagcaaatgagagacaacagtcctgtgcatcttcagtacagcatgtatggccataaaaccactcatcacactactgaaagaccctctgcctcactctatgaacagcacatggtgagccccatggttcatgtctatagaagtccatcctttggtccaaagcatctggaagaggaagaagagaggaatgagaaagaaggaagtgatgcaaaacatctccaaagaagtcttttggaacaggaaaatcattcaccactcacagggtcaaatatgaaatacaaaaccacgaaccaatcaacagaatttttatccttccaagatgccagctcattgtacagaaacattttagaaaaagaaagggaacttcagcaactgggaatcacagaatacctaaggaaaaacattgctcagctccagcctgatatggaggcacattatcctggagcccacgaagagctgaagttaatggaaacattaatgtactcacgtccaaggaaggtattagtggaacagacaaaaaatgagtattttgaacttaaagctaatttacatgctgaacctgactatttagaagtcctggagcagcaaacactcgaggcg

SEQ ID NO: 576 - protein, 629 aa, Homo sapiens
RGTKWACNCDLLQLKTWLENMPPQSIIGDVVCNSPPFFKGSILSRLKKESICPTPPVYEEHEDPSGSLHLAATSSINDSRMSTKTTSILKLPTKAPGLIPYITKPSTQLPGPYCPIPCNCKVLSPSGLLIHCQERNIESLSDLRPPPQNPRKLILAGNIIHSLMKSDLVEYFTLEMLHLGNNRIEVLEEGSFMNLTRLQKLYLNGNHLTKLSKGMFLGLHNLEYLYLEYNAIKEILPGTFNPMPKLKVLYLNNNLLQVLPPHIFSGVPLTKVNLKTNQFTHLPVSNILDDLDLLTQIDLEDNPWDCSCDLVGLQQWIQKLSKNTVTDDILCTSPGHLDKKELKALNSEILCPGLVNNPSMPTQTSYLMVTTPATTTNTADTILRSLTDAVPLSVLILGLLIMFITIVFCAAGIVVLVLHRRRRYKKKQVDEQMRDNSPVHLQYSMYGHKTTHHTTERPSASLYEQHMVSPMVHVYRSPSFGPKHLEEEEERNEKEGSDAKHLQRSLLEQENHSPLTGSNMKYKTTNQSTEFLSFQDASSLYRNILEKERELQQLGITEYLRKNIAQLQPDMEAHYPGAHEELKLMETLMYSRPRKVLVEQTKNEYFELKANLHAEPDYLEVLEQQTLEA

SEQ ID NO: 577 - DNA, 1887 bp, Homo sapiens
  CDS (1)..(1887)
cgcggtaccaaatgggcctgcaattgtgacttattgcagttaaaaacttggttggagaacatgcccccacagtctataattggtgatgttgtctgcaacagccctccattttttaaaggaagtatactcagtagactaaagaaggaatctatttgccctactccaccagtgtatgaagaacatgaggatccttcaggatcattacatctggcagcaacatcttcaataaatgatagtcgcatgtcaactaagaccacgtccattctaaaactacccaccaaagcaccaggtttgataccttatattacaaagccatccactcaacttccaggaccttactgccctattccttgtaactgcaaagtcctatccccatcaggacttctaatacattgtcaggagcgcaacattgaaagcttatcagatctgagacctcctccgcaaaatcctagaaagctcattctagcgggaaatattattcacagtttaatgaagtctgatctagtggaatatttcactttggaaatgcttcacttgggaaacaatcgtattgaagttcttgaagaaggatcgtttatgaacctaacgagattacaaaaactctatctaaatggtaaccacctgaccaaattaagtaaaggcatgttccttggtctccataatcttgaatacttatatcttgaatacaatgccattaaggaaatactgccaggaacctttaatccaatgcctaaacttaaagtcctgtatttaaataacaacctcctccaagttttaccaccacatattttttcaggggttcctctaactaaggtaaatcttaaaacaaaccagtttacccatctacctgtaagtaatattttggatgatcttgatttactaacccagattgaccttgaggataacccctgggactgctcctgtgacctggttggactgcagcaatggatacaaaagttaagcaagaacacagtgacagatgacatcctctgcacttcccccgggcatctcgacaaaaaggaattgaaagccctaaatagtgaaattctctgtccaggtttagtaaataacccatccatgccaacacagactagttaccttatggtcaccactcctgcaacaacaacaaatacggctgatactattttacgatctcttacggacgctgtgccactgtctgttctaatattgggacttctgattatgttcatcactattgttttctgtgctgcagggatagtggttcttgttcttcaccgcaggagaagatacaaaaagaaacaagtagatgagcaaatgagagacaacagtcctgtgcatcttcagtacagcatgtatggccataaaaccactcatcacactactgaaagaccctctgcctcactctatgaacagcacatggtgagccccatggttcatgtctatagaagtccatcctttggtccaaagcatctggaagaggaagaagagaggaatgagaaagaaggaagtgatgcaaaacatctccaaagaagtcttttggaacaggaaaatcattcaccacttacagggtcaaatatgaaatacaaaaccacgaaccaatcaacagaatttttatccttccaagatgccagctcattgtacagaaacattttagaaaaagaaagggaacttcagcaactgggaatcacagaatacctaaggaaaaacattgctcagctccagcctgatatggaggcacattatcctggagcccacgaagagctgaagttaatggaaacattaatgtactcacgtccaaggaaggtattagtggaacagacaaaaaatgagtattttgaacttaaagctaatttacatgctgaacctgactatttagaagtcctggagcagcaaacactcgaggcg

SEQ ID NO: 578 - protein, 629 aa, Homo sapiens; identical to SEQ ID NO: 576

SEQ ID NO: 579 - DNA, 2433 bp, Homo sapiens
  CDS (1)..(2433)
cgcggtaccaccatgctaataaattgtgaagcaaaaggtatcaagatggtatctgaaataagtgtgccaccatcacgacctttccaactaagcttattaaataacggcttgacgatgcttcacacaaatgacttttctgggcttaccaatgctatttcaatacaccttggatttaacaatattgcagatattgagataggtgcatttaatggccttggcctcctgaaacaacttcatatcaatcacaattctttagaaattcttaaagaggatactttccatggactggaaaacctggaattcctgcaagcagataacaattttatcacagtgattgaaccaagtgcctttagcaagctcaacagactcaaagtgttaattttaaatgacaatgctattgagagtcttcctccaaacatcttccgatttgttcctttaacccatctagatcttcgtggaaatcaattacaaacattgccttatgttggttttctcgaacacattggccgaatattggatcttcagttggaggacaacaaatgggcctgcaattgtgacttattgcagttaaaaacttggttggagaacatgcctccacagtctataattggtgatgttgtctgcaacagccctccattttttaaaggaagtatactcagtagactaaagaaggaatctatttgccctactccaccagtgtatgaagaacatgaggatccttcaggatcattacatctggcagcaacatcttcaataaatgatagtcgcatgtcaactaagaccacgtccattctaaaactacccaccaaagcaccaggtttgataccttatattacaaagccatccactcaacttccaggaccttactgccctattccttgtaactgcaaagtcctatccccatcaggacttctaatacattgtcaggagcgcaacattgaaagcttatcagatctgagacctcctccgcaaaatcctagaaagctcattctagcgggaaatattattcacagtttaatgaagtctgatctagtggaatatttcactttggaaatgcttcacttgggaaacaatcgtattgaagttcttgaagaaggatcgtttacgaacctaacgagattacaaaaactctatctaaatggtaaccacctgaccaaattaagtaaaggcatgttccttggtctccataatcttgaatacttatatcttgaatacaatgccattaaggaaatactgccaggaacctttaatccaatgcctaaacttaaagtcctgtatttaaataacaacctcctccaagttttaccaccacatattttttcaggggttcctctaactaaggtaaatcttaaaacaaaccagtttacccatctacctgtaagtaatattttggatgatcttgatttactaacccagattgaccttgaggataacccctgggactgctcctgtgacctggttggactgcagcaatggatacaaaagttaagcaagaacacagtgacagatgacatcctctgcacttcccccgggcatctcgacaaaaaggaattgaaagccctaaatagtgaaattctctgtccaggtttagtaaataacccatccatgccaacacagactagttaccttatggtcaccactcctgcaacaacaacaaatacggctgatactattttacgatctcttacggacgctgtgccactgtctgttctaatattgggacttctgattatgttcatcactattgttttctgtgctgcagggatagtggttcttgttcttcaccgcaggagaagatacaagaagaaacaagtagatgagcaaatgagagacaacagtcctgtgcatcttcagtacagcatgtatggccataaaaccactcatcacactactgaaagaccctctgcctcactctatgaacagcacatggtgagccccatggttcatgtctatagaagtccatcctttggtccaaagcatctggaagaggaagaagagaggaatgagaaagaaggaagtgatgcaaaacatctccaaagaagtcttttggaacaggaaaatcattcaccactcacagggtcaaatatgaaatacaaaaccacgaaccaatcaacagaatttttatccttccaagatgccagctcattgtacagaaacattttagaaaaagaaagggaacttcagcaactgggaatcacagaatacctaaggaaaaacattgctcagctccagcctgatatggaggcacattatcctggagcccacgaagagctgaagttaatggaaacattaatgtactcacgtccaaggaaggtattagtggagcagacaaaaaatgagtattttgaacttaaagctaatttacatgctgaacctgactatttagaagtcctggagcagcaaacactcgaggcgaagggcgaattccagcac

SEQ ID NO: 580 - protein, 811 aa, Homo sapiens
RGTTMLINCEAKGIKMVSEISVPPSRPFQLSLLNNGLTMLHTNDFSGLTNAISIHLGFNNIADIEIGAFNGLGLLKQLHINHNSLEILKEDTFHGLENLEFLQADNNFITVIEPSAFSKLNRLKVLILNDNAIESLPPNIFRFVPLTHLDLRGNQLQTLPYVGFLEHIGRILDLQLEDNKWACNCDLLQLKTWLENMPPQSIIGDVVCNSPPFFKGSILSRLKKESICPTPPVYEEHEDPSGSLHLAATSSINDSRMSTKTTSILKLPTKAPGLIPYITKPSTQLPGPYCPIPCNCKVLSPSGLLIHCQERNIESLSDLRPPPQNPRKLILAGNIIHSLMKSDLVEYFTLEMLHLGNNRIEVLEEGSFTNLTRLQKLYLNGNHLTKLSKGMFLGLHNLEYLYLEYNAIKEILPGTFNPMPKLKVLYLNNNLLQVLPPHIFSGVPLTKVNLKTNQFTHLPVSNILDDLDLLTQIDLEDNPWDCSCDLVGLQQWIQKLSKNTVTDDILCTSPGHLDKKELKALNSEILCPGLVNNPSMPTQTSYLMVTTPATTTNTADTILRSLTDAVPLSVLILGLLIMFITIVFCAAGIVVLVLHRRRRYKKKQVDEQMRDNSPVHLQYSMYGHKTTHHTTERPSASLYEQHMVSPMVHVYRSPSFGPKHLEEEEERNEKEGSDAKHLQRSLLEQENHSPLTGSNMKYKTTNQSTEFLSFQDASSLYRNILEKERELQQLGITEYLRKNIAQLQPDMEAHYPGAHEELKLMETLMYSRPRKVLVEQTKNEYFELKANLHAEPDYLEVLEQQTLEAKGEFQH

SEQ ID NO: 581 - DNA, 1668 bp, Homo sapiens
  CDS (1)..(1626)
atgctaataaattgtgaagcaaaaggtatcaagatggtatctgaaataagtgtgccaccatcacgacctttccaactaagcttattaaataacggcttgacgatgcttcacacaaatgacttttctgggcttaccaatgctatttcaatacaccttggatttaacaatattgcagatattgagataggtgcatttaatggccttggcctcctgaaacaacttcatatcaatcacaattctttagaaattcttaaagaggatactttccatggactggaaaacctggaattcctgcaagcagataacaattttatcacagtgattgaaccaagtgcctttagcaagctcaacagactcaaagtgttaattttaaatgacaatgctattgagagtcttcctccaaacatcttccgatttgttcctttaacccatctagatcttcgtggaaatcaattacaaacattgccttatgttggttttctcgaacacattggccgaatattggatcttcagttggaggacaacaaatgggcctgcaattgtgacttattgcagttaaaaacttggttggagaacatgcctccacagtctataattggtgatgttgtctgcaacagccctccattttttaaaggaagtatactcagtagactaaagaaggaatctatttgccctactccaccagtgtatgaagaacatgaggatccttcaggatcattacatctggcagcaacatcttcaataaatgatagtcgcatgtcaactaagaccacgtccattctaaaactacccaccaaagcaccaggtttgataccttatattacaaagccatccactcaacttccaggaccttactgccctattccttgtaactgcaaagtcctatccccatcaggacttctaatacattgtcaggagcgcaacattgaaagcttatcagatctgagacctcctccgcaaaatcctagaaagctcattctagcgggaaatattattcacagtttaatgaagtctgatctagtggaatatttcactttggaaatgcttcacttgggaaacaatcgtattgaagttcttgaagaaggatcgtttatgaacctaacgagattacaaaaactctatctaaatggtaaccacctgaccaaattaagtaaaggcatgttccttggtctccataatcttgaatacttatatcttgaatacaatgccattaaggaaatactgccaggaacctttaatccaatgcctaaacttaaagtcctgtatttaaataacaacctcctccaagttttaccaccacatattttttcaggggttcctctaactaaggtaaatcttaaaacaaaccagtttacccatctacctgtaagtaatattttggatgatcttgatttgctaacccagattgaccttgaggataacccctgggactgctcctgtgacctggttggactgcagcaatggatacaaaagttaagcaagaacacagtgacagatgacatcctctgcacttcccccgggcatctcgacaaaaaggaattgaaagccctaaatagtgaaattctctgtccaggtttagtaaataacccatccatgccaacacagactagttaccttatggtcaccactcctgcaacaacaacaaatacggctgatactattttacga

SEQ ID NO: 582 - protein, 542 aa, Homo sapiens
MLINCEAKGIKMVSEISVPPSRPFQLSLLNNGLTMLHTNDFSGLTNAISIHLGFNNIADIEIGAFNGLGLLKQLHINHNSLEILKEDTFHGLENLEFLQADNNFITVIEPSAFSKLNRLKVLILNDNAIESLPPNIFRFVPLTHLDLRGNQLQTLPYVGFLEHIGRILDLQLEDNKWACNCDLLQLKTWLENMPPQSIIGDVVCNSPPFFKGSILSRLKKESICPTPPVYEEHEDPSGSLHLAATSSINDSRMSTKTTSILKLPTKAPGLIPYITKPSTQLPGPYCPIPCNCKVLSPSGLLIHCQERNIESLSDLRPPPQNPRKLILAGNIIHSLMKSDLVEYFTLEMLHLGNNRIEVLEEGSFMNLTRLQKLYLNGNHLTKLSKGMFLGLHNLEYLYLEYNAIKEILPGTFNPMPKLKVLYLNNNLLQVLPPHIFSGVPLTKVNLKTNQFTHLPVSNILDDLDLLTQIDLEDNPWDCSCDLVGLQQWIQKLSKNTVTDDILCTSPGHLDKKELKALNSEILCPGLVNNPSMPTQTSYLMVT

SEQ ID NO: 583 - DNA, 1668 bp, Homo sapiens
  CDS (1)..(1668)
atgctaataaattgtgaagcaaaaggtatcaagatggtatctgaaataagtgtgccaccatcacgacctttccaactaagcttattaaataacggcttgacgatgcttcacacaaatgacttttctgggcttaccaatgctatttcaatacaccttggatttaacaatattgcagatattgagataggtgcatttaatggccttggcctcctgaaacaacttcatatcaatcacaattctttagaaattcttaaagaggatactttccatggactggaaaacctggaattcctgcaagcagataacaattttatcacagtgattgaaccaagtgcctttagcaagctcaacagactcaaagtgttaattttaaatgacaatgctattgagagtcttcctccaaacatcttccgatttgttcctttaacccatctagatcttcgtggaaatcaattacaaacattgccttatgttggttttctcgaacacattggccgaatattggatcttcagttggaggacaacaaatgggcctgcaattgtgacttattgcagttaaaaacttggttggagaacatgcctccacagtctataattggtgatgttgtctgcaacagccctccattttttaaaggaagtatactcagtagactaaagaaggaatctatttgccctactccaccagtgtatgaagaacatgaggatccttcaggatcattacatctggcagcaacatcttcaataaatgatagtcgcatatcaactaagaccacgtccattctaaaactacccaccaaggcaccaggtttgataccttatattacaaagccatccactcaacttccaggaccttactgccctattccttgtaactgcaaagtcctatccccatcaggacttctaatacattgtcaggagcgcaacattgaaagcttatcagatctgagacctcctccgcaaaatcctagaaagctcattctagcgggaaatattattcacagtttaatgaagtctgatctagtggaatatttcaccttggaaatgcttcacttgggaaacaatcgtattgaagttcttgaagaaggatcgtttatgaacctaacgagattacaaaaactctatctaaatggtaaccacctgaccaaattaagtaaaggcatgttccttggtctccataatcttgaatacttatatcttgaatacaatgccattaaggaaatactgccaggaacctttaatccaatgcctaaacttaaagtcctgtatttaaataacaacctcctccaagttttaccaccacatattttttcaggggttcctctaactaaggtaaatcttaaaacaaaccagtttacccatctacctgtaagtaatattttggatgatcttgatttactaacccagattgaccttgaggataacccctgggactgctcctgtgacctggttggactgcagcaatggatacaaaagttaagcaagaacacagtgacagatgacatcctctgcacttcccccgggcatctcgacaaaaaggaattgaaagccctaaatagtgaaattctctgtccaggtttagtaaataacccatccatgccaacacagactagttaccttatggtcaccactcctgcaacaacaacaaatacggctgatactattttacga

SEQ ID NO: 584 - protein, 556 aa, Homo sapiens
MLINCEAKGIKMVSEISVPPSRPFQLSLLNNGLTMLHTNDFSGLTNAISIHLGFNNIADIEIGAFNGLGLLKQLHINHNSLEILKEDTFHGLENLEFLQADNNFITVIEPSAFSKLNRLKVLILNDNAIESLPPNIFRFVPLTHLDLRGNQLQTLPYVGFLEHIGRILDLQLEDNKWACNCDLLQLKTWLENMPPQSIIGDVVCNSPPFFKGSILSRLKKESICPTPPVYEEHEDPSGSLHLAATSSINDSRISTKTTSILKLPTKAPGLIPYITKPSTQLPGPYCPIPCNCKVLSPSGLLIHCQERNIESLSDLRPPPQNPRKLILAGNIIHSLMKSDLVEYFTLEMLHLGNNRIEVLEEGSFMNLTRLQKLYLNGNHLTKLSKGMFLGLHNLEYLYLEYNAIKEILPGTFNPMPKLKVLYLNNNLLQVLPPHIFSGVPLTKVNLKTNQFTHLPVSNILDDLDLLTQIDLEDNPWDCSCDLVGLQQWIQKLSKNTVTDDILCTSPGHLDKKELKALNSEILCPGLVNNPSMPTQTSYLMVTTPATTTNTADTILR

SEQ ID NO: 585 - DNA, 2539 bp, Homo sapiens
  CDS (5)..(2527)
caacatgaagctgtggattcatctcttttattcatctctccttgcctgtatatctttacactcccaaactccagtgctctcatccagaggctcttgtgattctctttgcaattgtgaggaaaaagatggcacaatgctaataaattgtgaagcaaaaggtatcaagatggtatctgaaataagtgtgccaccatcacgacctttccaactaagcttattaaataacggcttgacgatgcttcacacaaatgacttttctgggcttaccaatgctatttcaatacaccttggatttaacaatattgcagatattgagataggtgcatttaatggccttggcctcctgaaacaacttcatatcaatcacaattctttagaaattcttaaagaggatactttccatggactggaaaacctggaattcctgcaagcagataacaattttatcacagtgattgaaccaagtgcctttagcaagctcaacagactcaaagtgttaattttaaatgacaatgctattgagagtcttcctccaaacatcttccgatttgttcctttaacccatctagatcttcgtggaaatcaattacaaacattgccttatgttggttttctcgaacacattggccgaatattggatcttcagttggaggacaacaaatgggcctgcaattgtgacttattgcagttaaaaacttggttggagaacatgcctccacagtctataattggtgatgttgtctgcaacagccctccattttttaaaggaagtatactcagtagactaaagaaggaatctatttgccctactccaccagtgtatgaagaacatgaggatccttcaggatcattacatctggcagcaacatcttcaataaatgatagtcgcatgtcaactaagaccacgtccattctaaaactacccaccaaagcaccaggtttgataccttatattacaaagccatccactcaacttccaggaccttactgccctattccttgtaactgcaaagtcctatccccatcaggacttctaatacattgtcaggagcgcaacattgaaagcttatcagatctgagacctcctccgcaaaatcctagaaagctcattctagcgggaaatattattcacagtttaatgaagtctgatctagtggaatatttcactttggaaatgcttcacttgggaaacaatcgtattgaagttcttgaagaaggatcgtttatgaacctaacgagattacaaaaactctatctaaatggtaaccacctgaccaaattaagtaaaggcatgttccttggtctccataatcttgaatacttatatcttgaatacaatgccattaaggaaatactgccaggaacctttaatccaatgcctaaacttaaagtcctgtatttaaataacaacctcctccaagttttaccaccacatattttttcaggggttcctctaactaaggtaaatcttaaaacaaaccagtttacccatctacctgtaagtaatattttggatgatcttgatttactaacccagattgaccttgaggataacccctgggactgctcctgtgacctggttggactgcagcaatggatacaaaagttaagcaagaacacagtgacagatgacatcctctgcacttcccccgggcatctcgacaaaaaggaattgaaagccctaaatagtgaaattctctgtccaggtttagtaaataacccatccatgccaacacagactagttaccttatggtcaccactcctgcaacaacaacaaatacggctgatactattttacgatctcttacggacgctgtgccactgtctgttctaatattgggacttctgattatgttcatcactattgttttctgtgctgcagggatagtggttcttgttcttcaccgcaggagaagatacaaaaagaaacaagtagatgagcaaatgagagacaacagtcctgtgcatcttcagtacagcatgtatggccataaaaccactcatcacactactgaaagaccctctgcctcactctatgaacagcacatggtgagccccatggttcatgtctatagaagtccatcctttggtccaaagcatctggaagaggaagaagagaggaatgagaaagaaggaagtgatgcaaaacatctccaaagaagtcttttggaacaggaaaatcattcaccactcacagggtcaaatatgaaatacaaaaccacgaaccaatcaacagaatttttatccttccaagatgccagctcattgtacagaaacattttagaaaaagaaagggaacttcagcaactgggaatcacagaatacctaaggaaaaacattgctcagctccagcctgatatggaggcacattatcctggagcccacgaagagctgaagttaatggaaacattaatgtactcacgtccaaggaaggtattagtggaacagacaaaaaatgagtattttgaacttaaagctaatttacatgctgaacctgactatttagaagtcctggagcagcaaacatagatggagagt

SEQ ID NO: 586 - protein, 841 aa, Homo sapiens
MKLWIHLFYSSLLACISLHSQTPVLSSRGSCDSLCNCEEKDGTMLINCEAKGIKMVSEISVPPSRPFQLSLLNNGLTMLHTNDFSGLTNAISIHLGFNNIADIEIGAFNGLGLLKQLHINHNSLEILKEDTFHGLENLEFLQADNNFITVIEPSAFSKLNRLKVLILNDNAIESLPPNIFRFVPLTHLDLRGNQLQTLPYVGFLEHIGRILDLQLEDNKWACNCDLLQLKTWLENMPPQSIIGDVVCNSPPFFKGSILSRLKKESICPTPPVYEEHEDPSGSLHLAATSSINDSRMSTKTTSILKLPTKAPGLIPYITKPSTQLPGPYCPIPCNCKVLSPSGLLIHCQERNIESLSDLRPPPQNPRKLILAGNIIHSLMKSDLVEYFTLEMLHLGNNRIEVLEEGSFMNLTRLQKLYLNGNHLTKLSKGMFLGLHNLEYLYLEYNAIKEILPGTFNPMPKLKVLYLNNNLLQVLPPHIFSGVPLTKVNLKTNQFTHLPVSNILDDLDLLTQIDLEDNPWDCSCDLVGLQQWIQKLSKNTVTDDILCTSPGHLDKKELKALNSEILCPGLVNNPSMPTQTSYLMVTTPATTTNTADTILRSLTDAVPLSVLILGLLIMFITIVFCAAGIVVLVLHRRRRYKKKQVDEQMRDNSPVHLQYSMYGHKTTHHTTERPSASLYEQHMVSPMVHVYRSPSFGPKHLEEEEERNEKEGSDAKHLQRSLLEQENHSPLTGSNMKYKTTNQSTEFLSFQDASSLYRNILEKERELQQLGITEYLRKNIAQLQPDMEAHYPGAHEELKLMETLMYSRPRKVLVEQTKNEYFELKANLHAEPDYLEVLEQQT

SEQ ID NO: 587 - DNA, 1648 bp, Homo sapiens; identical to SEQ ID NO: 573
  CDS (14)..(1639)

SEQ ID NO: 588 - protein, 542 aa, Homo sapiens; identical to SEQ ID NO: 582

SEQ ID NO: 589 - DNA, 1643 bp, Homo sapiens
  CDS (9)..(1634)
gcggccgcatgctaataaattgtgaagcaaaaggtatcaagatggtatctgaaataagtgtgccaccatcacgacctttccaactaagcttattaaataacggcttgacgatgcttcacacaaatgacttttctgggcttaccaatgctatttcaatacaccttggatttaacaatattgcagatattgagataggtgcatttaatggccttggcctcctgaaacaacttcatatcaatcacaattctttagaaattcttaaagaggatactttccatggactggaaaacctggaattcctgcaagcagataacaattttatcacagtgattgaaccaagtgcctttagcaagctcaacagactcaaagtgttaattttaaatgacaatgctattgagagtcttcctccaaacatcttccgatttgttcctttaacccatctagatcttcgtggaaatcaattacaaacattgccttatgttggttttctcgaacacattggccgaatattggatcttcagttggaggacaacaaatgggcctgcaattgtgacttattgcagttaaaaacttggttggagaacatgcctccacagtctataattggtgatgttgtctgcaacagccctccattttttaaaggaagtatactcagtagactaaagaaggaatctatttgccctactccaccagtgtatgaagaacatgaggatccttcaggatcattacatctggcagcaacatcttcaataaatgatagtcgcatgtcaactaagaccacgtccattctaaaactacccaccaaagcaccaggtttgataccttatattacaaagccatccactcaacttccaggaccttactgccctattccttgtaactgcaaagtcctatccccatcaggacttctaatacattgtcaggagcgcaacattgaaagcttatcagatctgagacctcctccgcaaaatcctagaaagctcattctagcgggaaatattattcacagtttaatgaagtctgatctagtggaatatttcactttggaaatgcttcacttgggaaacaatcgtattgaagttcttgaagaaggatcgtttatgaacctaacgagattacaaaaactctatctaaatggtaaccacctgaccaaattaagtaaaggcatgttccttggtctccataatcttgaatacttatatcttgaatacaatgccattaaggaaatactgccaggaacctttaatccaatgcctaaacttaaagtcctgtatttaaataacaacctcctccaagttttaccaccacatattttttcaggggttcctctaactaaggtaaatcttaaaacaaaccagtttacccatctacctgtaagtaatattttggatgatcttgatttactaacccagattgaccttgaggataacccctgggactgctcctgtgacctggttggactgcagcaatggatacaaaagttaagcaagaacacagtgacagatgacatcctctgcacttcccccgggcatctcgacaaaaaggaattgaaagccctaaatagtgaaattctctgtccaggtttagtaaataacccatccatgccaacacagactagttaccttatggtcaccctcgagggc

SEQ ID NO: 590 - protein, 542 aa, Homo sapiens; identical to SEQ ID NO: 582

SEQ ID NO: 591 - DNA, 2838 bp, Homo sapiens
  CDS (184)..(2706)
aactttatgaagctatgggacttgacaaaaagtgatatttgagaagaaagtacgcagtggttggtgttttcttttttttaataaaggaattgaattactttgaacacctcttccagctgtgcattacagataacgtcaggaagagtctctgctttacagaatcggatttcatcacatgacaacatgaagctgtggattcatctcttttattcatctctccttgcctgtatatctttacactcccaaactccagtgctctcatccagaggctcttgtgattctctttgcaattgtgaggaaaaagatggcacaatgctaataaattgtgaagcaaaaggtatcaagatggtatctgaaataagtgtgccaccatcacgacctttccaactaagcttattaaataacggcttgacgatgcttcacacaaatgacttttctgggcttaccaatgctatttcaatacaccttggatttaacaatattgcagatattgagataggtgcatttaatggccttggcctcctgaaacaacttcatatcaatcacaattctttagaaattcttaaagaggatactttccatggactggaaaacctggaattcctgcaagcagataacaattttatcacagtgattgaaccaagtgcctttagcaagctcaacagactcaaagtgttaattttaaatgacaatgctattgagagtcttcctccaaacatcttccgatttgttcctttaacccatctagatcttcgtggaaatcaattacaaacattgccttatgttggttttctcgaacacattggccgaatattggatcttcagttggaggacaacaaatgggcctgcaattgtgacttattgcagttaaaaacttggttggagaacatgcctccacagtctataattggtgatgttgtctgcaacagccctccattttttaaaggaagtatactcagtagactaaagaaggaatctatttgccctactccaccagtgtatgaagaacatgaggatccttcaggatcattacatctggcagcaacatcttcaataaatgatagtcgcatgtcaactaagaccacgtccattctaaaactacccaccaaagcaccaggtttgataccttatattacaaagccatccactcaacttccaggaccttactgccctattccttgtaactgcaaagtcctatccccatcaggacttctaatacattgtcaggagcgcaacattgaaagcttatcagatctgagacctcctccgcaaaatcctagaaagctcattctagcgggaaatattattcacagtttaatgaagtctgatctagtggaatatttcactttggaaatgcttcacttgggaaacaatcgtattgaagttcttgaagaaggatcgtttatgaacctaacgagattacaaaaactctatctaaatggtaaccacctgaccaaattaagtaaaggcatgttccttggtctccataatcttgaatacttatatcttgaatacaatgccattaaggaaatactgccaggaacctttaatccaatgcctaaacttaaagtcctgtatttaaataacaacctcctccaagttttaccaccacatattttttcaggggttcctctaactaaggtaaatcttaaaacaaaccagtttacccatctacctgtaagtaatattttggatgatcttgatttactaacccagattgaccttgaggataacccctgggactgctcctgtgacctggttggactgcagcaatggatacaaaagttaagcaagaacacagtgacagatgacatcctctgcacttcccccgggcatctcgacaaaaaggaattgaaagccctaaatagtgaaattctctgtccaggtttagtaaataacccatccatgccaacacagactagttaccttatggtcaccactcctgcaacaacaacaaatacggctgatactattttacgatctcttacggacgctgtgccactgtctgttctaatattgggacttctgattatgttcatcactattgttttctgtgctgcagggatagtggttcttgttcttcaccgcaggagaagatacaaaaagaaacaagtagatgagcaaatgagagacaacagtcctgtgcatcttcagtacagcatgtatggccataaaaccactcatcacactactgaaagaccctctgcctcactctatgaacagcacatggtgagccccatggttcatgtctatagaagtccatcctttggtccaaagcatctggaagaggaagaagagaggaatgagaaagaaggaagtgatgcaaaacatctccaaagaagtcttttggaacaggaaaatcattcaccactcacagggtcaaatatgaaatacaaaaccacgaaccaatcaacagaatttttatccttccaagatgccagctcattgtacagaaacattttagaaaaagaaagggaacttcagcaactgggaatcacagaatacctaaggaaaaacattgctcagctccagcctgatatggaggcacattatcctggagcccacgaagagctgaagttaatggaaacattaatgtactcacgtccaaggaaggtattagtggaacagacaaaaaatgagtattttgaacttaaagctaatttacatgctgaacctgactatttagaagtcctggagcagcaaacatagatggagagtttgagggctttcgcagaaatgctgtgattctgttttaagtccataccttgtaaattagtgccttacgtgagtgtgtcatccatcagaacctaagcacagcagtaaactatggagaaaaaa

SEQ ID NO: 592 - protein, 841 aa, Homo sapiens; identical to SEQ ID NO: 586

SEQ ID NO: 593 - DNA, 2531 bp, Homo sapiens
  CDS (2)..(2512)
ggattctctcttttattcatctctccttgcctgtatatctttacactcccaaactccagtgctctcatccagaggctcttgtgattctctttgcaattgtgaggaaaaagatggcacaatgctaataaattgtgaagcaaaaggtatcaagatggtatctgaaataagtgtgctaccatcacgacctttccaactaagcttattaaataacggcttgacgatgcttcacacaaatgacttttctgggcttaccaatgctatttcaatacaccttggatttaacaatattgcagatattgagataggtgcatttaatggccttggcctcctgaaacaacttcatatcaatcacaattctttagaaattcttaaagaggatactttccatggactggaaaacctggaattcctgcaagcagataacaattttatcacagtgattgaaccaagtgcctttagcaagctcaacagactcaaagtgttaattttaaatgacaatgctattgagagtcttcctccaaacatcttccgatttgttcctttaacccatctagatcttcgtggaaatcaattacaaacattgccttatgttggttttctcgaacacattggccgaatattggatcttcagttggaggacaacaaatgggcctgcaattgtgacttattgcagttaaaaacttggttggagaacatgcctccacagtctataattggtgatgttgtctgcaacagccctccattttttaaaggaagtatactcagtagactaaagaaggaatctatttgccctactccaccagtgtatgaagaacatgaggatccttcaggatcattacatctggcagcaacatcttcaataaatgatagtcgcatgtcaactaagaccacgtccattctaaaactacccaccaaagcaccaggtttgataccttatattacaaagccatccactcaacttccaggaccttactgccctattccttgtaactgcaaagtcctatccccatcaggacttctaatacattgtcaggagcgcaacattgaaagcttatcagatctgagacctcctccgcaaaatcctagaaagctcattctagcgggaaatattattcacagtttaatgaagtctgatctagtggaatatttcactttggaaatgcttcacttgggaaacaatcgtattgaagttcttgaagaaggatcgtttatgaacctaacgagattacaaaaactctatctaaatggtaaccacctgaccaaattaagtaaaggcatgttccttggtctccataatcttgaatacttatatcttgaatacaatgccattaaggaaatactgccaggaacctttaatccaatgcctaaacttaaagtcctgtatttaaataacaacctcctccaagttttaccaccacatattttttcaggggttcctctaactaaggtaaatcttaaaacaaaccagtttacccatctacctgtaagtaatattttggatgatcttgatttgctaacccagattgaccttgaggataacccctgggactgctcctgtgacctggttggactgcagcaatggatacaaaagttaagcaagaacacagtgacagatgacatcctctgcacttcccccgggcatctcgacaaaaaggaattgaaagccctaaatagtgaaattctctgtccaggtttagtaaataacccatccatgccaacacagactagttaccttatggtcaccactcctgcaacaacaacaaatacggctgatactattttacgatctcttacggacgctgtgccactgtctgttctaatattgggacttctgattatgttcatcactattgttttctgtgctgcagggatagtggttcttgttcttcaccgcaggagaagatacaaaaagaaacaagtagatgagcaaatgagagacaacagtcctgtgcatcttcagtacagcatgtatggccataaaaccactcatcacactactgaaagaccctctgcctcactctatgaacagcacatggtgagccccatggttcatgtctatagaagtccatcctttggtccaaagcatctggaagaggaagaagagaggaatgagaaagaaggaagtgatgcaaaacatctccaaagaagtcttttggaacaggaaaatcattcaccactcacagggtcaaatatgaaatacaaaaccacgaaccaatcaacagaatttttatccttccaagatgccagctcattgtacagaaacattttagaaaaagaaagggaacttcagcaactgggaatcacagaatacctaaggaaaaacattgctcagctccagcctgatatggaggcacattatcctggagcccacgaagagctgaagttaatggaaacattaatgtactcacgtccaaggaaggtattagtggaacagacaaaaaatgagtattttgaacttaaagctaatttacatgctgaacctgactatttagaagtcctggagcagcaaacataagggcgaattctgctgt

SEQ ID NO: 594 - protein, 837 aa, Homo sapiens
DSLFYSSLLACISLHSQTPVLSSRGSCDSLCNCEEKDGTMLINCEAKGIKMVSEISVLPSRPFQLSLLNNGLTMLHTNDFSGLTNAISIHLGFNNIADIEIGAFNGLGLLKQLHINHNSLEILKEDTFHGLENLEFLQADNNFITVIEPSAFSKLNRLKVLILNDNAIESLPPNIFRFVPLTHLDLRGNQLQTLPYVGFLEHIGRILDLQLEDNKWACNCDLLQLKTWLENMPPQSIIGDVVCNSPPFFKGSILSRLKKESICPTPPVYEEHEDPSGSLHLAATSSINDSRMSTKTTSILKLPTKAPGLIPYITKPSTQLPGPYCPIPCNCKVLSPSGLLIHCQERNIESLSDLRPPPQNPRKLILAGNIIHSLMKSDLVEYFTLEMLHLGNNRIEVLEEGSFMNLTRLQKLYLNGNHLTKLSKGMFLGLHNLEYLYLEYNAIKEILPGTFNPMPKLKVLYLNNNLLQVLPPHIFSGVPLTKVNLKTNQFTHLPVSNILDDLDLLTQIDLEDNPWDCSCDLVGLQQWIQKLSKNTVTDDILCTSPGHLDKKELKALNSEILCPGLVNNPSMPTQTSYLMVTTPATTTNTADTILRSLTDAVPLSVLILGLLIMFITIVFCAAGIVVLVLHRRRRYKKKQVDEQMRDNSPVHLQYSMYGHKTTHHTTERPSASLYEQHMVSPMVHVYRSPSFGPKHLEEEEERNEKEGSDAKHLQRSLLEQENHSPLTGSNMKYKTTNQSTEFLSFQDASSLYRNILEKERELQQLGITEYLRKNIAQLQPDMEAHYPGAHEELKLMETLMYSRPRKVLVEQTKNEYFELKANLHAEPDYLEVLEQQT

SEQ ID NO: 595 - DNA, 1758 bp, Homo sapiens
  CDS (10)..(1749)
cgcggatcccaaactccagtgctctcatccagaggctcttgtgattctctttgcaattgtgaggaaaaagatggcacaatgctaataaattgtgaagcaaaaggtatcaagatggtatctgaaataagtgtgccaccatcacgacctttccaactaagcttattaaataacggcttgacgatgcttcacacaaatgacttttctgggcttaccaatgctatttcaatacaccttggatttaacaatattgcagatattgagataggtgcatttaatggccttggcctcctgaaacaacttcatatcaatcacaattctttagaaattcttaaagaggatactttccatggactggaaaacctggaattcctgcaagcagataacaattttatcacagtgattgaaccaagtgcctttagcaagctcaacagactcaaagtgttaattttaaatgacaatgctattgagagtcttcctccaaacatcttccgatttgttcctttaacccatctagatcttcgtggaaatcaattacaaacattgccttatgttggttttctcgaacacattggccgaatattggatcttcagttggaggacaacaaatgggcctgcaattgtgacttattgcagttaaaaacttggttggagaacatgcctccacagtctataattggtgatgttgtctgcaacagccctccattttttaaaggaagtatactcagtagactaaagaaggaatctatttgccctactccaccagtgtatgaagaacatgaggatccttcaggatcattacatctggcagcaacatcttcaataaatgatagtcgcatgtcaactaagaccacgtccattctaaaactacccaccaaagcaccaggtttgataccttatattacaaagccatccactcaacttccaggaccttactgccctattccttgtaactgcaaagtcctatccccatcaggacttctaatacattgtcaggagcgcaacattgaaagcttatcagatctgagacctcctccgcaaaatcctagaaagctcattctagcgggaaatattattcacagtttaatgaagtctgatctagtggaatatttcactttggaaatgcttcacttgggaaacaatcgtattgaagttcttgaagaaggatcgtttatgaacctaacgagattacaaaaactctatctaaatggtaaccacctgaccaaattaagtaaaggcatgttccttggtctccataatcttgaatacttatatcttgaatacaatgccattaaggaaatactgccaggaacctttaatccaatgcctaaacttaaagtcctgtatttaaataacaacctcctccaagttttaccaccacatattttttcaggggttcctctaactaaggtaaatcttaaaacaaaccagtttacccatctacctgtaagtaatattttggatgatcttgatttactaacccagattgaccttgaggataacccctgggactgctcctgtgacctggttggactgcagcaatggatacaaaagttaagcaagaacacagtgacagatgacatcctctgcacttcccccgggcatctcgacaaaaaggaattgaaagccctaaatagtgaaattctctgtccaggtttagtaaataacccatccatgccaacacagactagttaccttatggtcaccactcctgcaacaacaacaaatacggctgatactattttacgatctctcgaggcg

SEQ ID NO: 596 - protein, 580 aa, Homo sapiens
QTPVLSSRGSCDSLCNCEEKDGTMLINCEAKGIKMVSEISVPPSRPFQLSLLNNGLTMLHTNDFSGLTNAISIHLGFNNIADIEIGAFNGLGLLKQLHINHNSLEILKEDTFHGLENLEFLQADNNFITVIEPSAFSKLNRLKVLILNDNAIESLPPNIFRFVPLTHLDLRGNQLQTLPYVGFLEHIGRILDLQLEDNKWACNCDLLQLKTWLENMPPQSIIGDVVCNSPPFFKGSILSRLKKESICPTPPVYEEHEDPSGSLHLAATSSINDSRMSTKTTSILKLPTKAPGLIPYITKPSTQLPGPYCPIPCNCKVLSPSGLLIHCQERNIESLSDLRPPPQNPRKLILAGNIIHSLMKSDLVEYFTLEMLHLGNNRIEVLEEGSFMNLTRLQKLYLNGNHLTKLSKGMFLGLHNLEYLYLEYNAIKEILPGTFNPMPKLKVLYLNNNLLQVLPPHIFSGVPLTKVNLKTNQFTHLPVSNILDDLDLLTQIDLEDNPWDCSCDLVGLQQWIQKLSKNTVTDDILCTSPGHLDKKELKALNSEILCPGLVNNPSMPTQTSYLMVTTPATTTNTADTILRS

SEQ ID NO: 597 - DNA, 1762 bp, Homo sapiens
  CDS (14)..(1753)
cacctcgcgaacccaaactccagtgctctcatccagaggctcttgtgattctctttgcaattgtgaggaaaaagatggcacaatgctaataaattgtgaagcaaaaggtatcaagatggtatctgaaataagtgtgccaccatcacgacctttccaactaagcttattaaataacggcttgacgatgcttcacacaaatgacttttctgggcttaccaatgctatttcaatacaccttggatttaacaatattgcagatattgagataggtgcatttaatggccttggcctcctgaaacaacttcatatcaatcacaattctttagaaattcttaaagaggatactttccatggactggaaaacctggaattcctgcaagcagataacaattttatcacagtgattgaaccaagtgcctttagcaagctcaacagactcaaagtgttaattttaaatgacaatgctattgagagtcttcctccaaacatcttccgatttgttcctttaacccatctagatcttcgtggaaatcaattacaaacattgccttatgttggttttctcgaacacattggccgaatattggatcttcagttggaggacaacaaatgggcctgcaattgtgacttattgcagttaaaaacttggttggagaacatgcctccacagtctataattggtgatgttgtctgcaacagccctccattttttaaaggaagtatactcagtagactaaagaaggaatctatttgccctactccaccagtgtatgaagaacatgaggatccttcaggatcattacatctggcagcaacatcttcaataaatgatagtcgcatgtcaactaagaccacgtccattctaaaactacccaccaaagcaccaggtttgataccttatattacaaagccatccactcaacttccaggaccttactgccctattccttgtaactgcaaagtcctatccccatcaggacttctaatacattgtcaggagcgcaacattgaaagcttatcagatctgagacctcctccgcaaaatcctagaaagctcattctagcgggaaatattattcacagtttaatgaagtctgatctagtggaatatttcactttggaaatgcttcacttgggaaacaatcgtattgaagttcttgaagaaggatcgtttatgaacctaacgagattacaaaaactctatctaaatggtaaccacctgaccaaattaagtaaaggcatgttccttggtctccataatcttgaatacttatatcttgaatacaatgccattaaggaaatactgccaggaacctttaatccaatgcctaaacttaaagtcctgtatttaaataacaacctcctccaagttttaccaccacatattttttcaggggttcctctaactaaggtaaatcttaaaacaaaccagtttacccatctacctgtaagtaatattttggatgatcttgatttactaacccagattgaccttgaggataacccctgggactgctcctgtgacctggttggactgcagcaatggatacaaaagttaagcaagaacacagtgacagatgacatcctctgcacttcccccgggcatctcgacaaaaaggaattgaaagccctaaatagtgaaattctctgtccaggtttagtaaataacccatccatgccaacacagactagttaccttatggtcaccactcctgcaacaacaacaaatacggctgatactattttacgatctgtcgacggc

SEQ ID NO: 598 - protein, 580 aa, Homo sapiens; identical to SEQ ID NO: 596

SEQ ID NO: 599 - DNA, 2481 bp, Homo sapiens
  CDS (10)..(2472)
cgcggatcccaaactccagtgctctcatccagaggctcttgtgattctctttgcaattgtgaggaaaaagatggcacaatgctaataaattgtgaagcaaaaggtatcaagatggtatctgaaataagtgtgccaccatcacgacctttccaactaagcttattaaataacggcttgacgatgcttcacacaaatgacttttctgggcttaccaatgctatttcaatacaccttggatttaacaatattgcagatattgagataggtgcatttaatggccttggcctcctgaaacaacttcatatcaatcacaattctttagaaattcttaaagaggatactttccatggactggaaaacctggaattcctgcaagcagataacaattttatcacagtgattgaaccaagtgcctttagcaagctcaacagactcaaagtgttaattttaaatgacaatgctattgagagtcttcctccaaacatcttccgatttgttcctttaacccatctagatcttcgtggaaatcaattacaaacattgccttatgttggttttctcgaacacattggccgaatattggatcttcagttggaggacaacaaatgggcctgcaattgtgacttattgcagttaaaaacttggttggagaacatgcctccacagtctataattggtgatgttgtctgcaacagccctccattttttaaaggaagtatactcagtagactaaagaaggaatctatttgccctactccaccagtgtatgaagaacatgaggatccttcaggatcattacatctggcagcaacatcttcaataaatgatagtcgcatgtcaactaagaccacgtccattctaaaactacccaccaaagcaccaggtttgataccttatattacaaagccatccactcaacttccaggaccttactgccctattccttgtaactgcaaagtcctatccccatcaggacttctaatacattgtcaggagcgcaacattgaaagcttatcagatctgagacctcctccgcaaaatcctagaaagctcattctagcgggaaatattattcacagtttaatgaagtctgatctagtggaatatttcactttggaaatgcttcacttgggaaacaatcgtattgaagttcttgaagaaggatcgtttatgaacctaacgagattacaaaaactctatctaaatggtaaccacctgaccaaattaagtaaaggcatgttccttggtctccataatcttgaatacttatatcttgaatacaatgccattaaggaaatactgccaggaacctttaatccaatgcctaaacttaaagtcctgtatttaaataacaacctcctccaagttttaccaccacatattttttcaggggttcctctaactaaggtaaatcttaaaacaaaccagtttacccatctacctgtaagtaatattttggatgatcttgatttactaacccagattgaccttgaggataacccctgggactgctcctgtgacctggttggactgcagcaatggatacaaaagttaagcaagaacacagtgacagatgacatcctctgcacttcccccgggcatctcgacaaaaaggaattgaaagccctaaatagtgaaattctctgtccaggtttagtaaataacccatccatgccaacacagactagttaccttatggtcaccactcctgcaacaacaacaaatacggctgatactattttacgatctcttacggacgctgtgccactgtctgttctaatattgggacttctgattatgttcatcactattgttttctgtgctgcagggatagtggttcttgttcttcaccgcaggagaagatacaaaaagaaacaagtagatgagcaaatgagagacaacagtcctgtgcatcttcagtacagcatgtatggccataaaaccactcatcacactactgaaagaccctctgcctcactctatgaacagcacatggtgagccccatggttcatgtctatagaagtccatcctttggtccaaagcatctggaagaggaagaagagaggaatgagaaagaaggaagtgatgcaaaacatctccaaagaagtcttttggaacaggaaaatcattcaccactcacagggtcaaatatgaaatacaaaaccacgaaccaatcaacagaatttttatccttccaagatgccagctcattgtacagaaacattttagaaaaagaaagggaacttcagcaactgggaatcacagaatacctaaggaaaaacattgctcagctccagcctgatatggaggcacattatcctggagcccacgaagagctgaagttaatggaaacattaatgtactcacgtccaaggaaggtattagtggaacagacaaaaaatgagtattttgaacttaaagctaatttacatgctgaacctgactatttagaagtcctggagcagcaaacactcgaggcg

SEQ ID NO: 600 - protein, 821 aa, Homo sapiens
QTPVLSSRGSCDSLCNCEEKDGTMLINCEAKGIKMVSEISVPPSRPFQLSLLNNGLTMLHTNDFSGLTNAISIHLGFNNIADIEIGAFNGLGLLKQLHINHNSLEILKEDTFHGLENLEFLQADNNFITVIEPSAFSKLNRLKVLILNDNAIESLPPNIFRFVPLTHLDLRGNQLQTLPYVGFLEHIGRILDLQLEDNKWACNCDLLQLKTWLENMPPQSIIGDVVCNSPPFFKGSILSRLKKESICPTPPVYEEHEDPSGSLHLAATSSINDSRMSTKTTSILKLPTKAPGLIPYITKPSTQLPGPYCPIPCNCKVLSPSGLLIHCQERNIESLSDLRPPPQNPRKLILAGNIIHSLMKSDLVEYFTLEMLHLGNNRIEVLEEGSFMNLTRLQKLYLNGNHLTKLSKGMFLGLHNLEYLYLEYNAIKEILPGTFNPMPKLKVLYLNNNLLQVLPPHIFSGVPLTKVNLKTNQFTHLPVSNILDDLDLLTQIDLEDNPWDCSCDLVGLQQWIQKLSKNTVTDDILCTSPGHLDKKELKALNSEILCPGLVNNPSMPTQTSYLMVTTPATTTNTADTILRSLTDAVPLSVLILGLLIMFITIVFCAAGIVVLVLHRRRRYKKKQVDEQMRDNSPVHLQYSMYGHKTTHHTTERPSASLYEQHMVSPMVHVYRSPSFGPKHLEEEEERNEKEGSDAKHLQRSLLEQENHSPLTGSNMKYKTTNQSTEFLSFQDASSLYRNILEKERELQQLGITEYLRKNIAQLQPDMEAHYPGAHEELKLMETLMYSRPRKVLVEQTKNEYFELKANLHAEPDYLEVLEQQT

SEQ ID NO: 601 - DNA, 2548 bp, Homo sapiens
  CDS (14)..(2536)
caccggtaccaccatgaagctgtggattcatctcttttattcatctctccttgcctgtatatctttacactcccaaactccagtgctctcatccagaggctcttgtgattctctttgcaattgtgaggaaaaagatggcacaatgctaataaattgtgaagcaaaaggtatcaagatggtatctgaaataagtgtgccaccatcacgacctttccaactaagcttattaaataacggcttgacgatgcttcacacaaatgacttttctgggcttaccaatgctatttcaatacaccttggatttaacaatattgcagatattgagataggtgcatttaatggccttggcctcctgaaacaacttcatatcaatcacaattctttagaaattcttaaagaggatactttccatggactggaaaacctggaattcctgcaagcagataacaattttatcacagtgattgaaccaagtgcctttagcaagctcaacagactcaaagtgttaattttaaatgacaatgctattgagagtcttcctccaaacatcttccgatttgttcctttaacccatctagatcttcgtggaaatcaattacaaacattgccttatgttggttttctcgaacacattggccgaatattggatcttcagttggaggacaacaaatgggcctgcaattgtgacttattgcagttaaaaacttggttggagaacatgcctccacagtctataattggtgatgttgtctgcaacagccctccattttttaaaggaagtatactcagtagactaaagaaggaatctatttgccctactccaccagtgtatgaagaacatgaggatccttcaggatcattacatctggcagcaacatcttcaataaatgatagtcgcatgtcaactaagaccacgtccattctaaaactacccaccaaagcaccaggtttgataccttatattacaaagccatccactcaacttccaggaccttactgccctattccttgtaactgcaaagtcctatccccatcaggacttctaatacattgtcaggagcgcaacattgaaagcttatcagatctgagacctcctccgcaaaatcctagaaagctcattctagcgggaaatattattcacagtttaatgaagtctgatctagtggaatatttcactttggaaatgcttcacttgggaaacaatcgtattgaagttcttgaagaaggatcgtttatgaacctaacgagattgcaaaaactctatctaaatggtaaccacctgaccaaattaagtaaaggcatgttccttggtctccataatcttgaatacttatatcttgaatacaatgccattaaggaaatactgccaggaacctttaatccaatgcctaaacttaaagtcctgtatttaaataacaacctcctccaagttttaccaccacatattttttcaggggttcctctaactaaggtaaatcttaaaacaaaccagtttacccatctacctgtaagtaatattttggatgatcttgatttactaacccagattgaccttgaggataacccctgggactgctcctgtgacctggttggactgcagcaatggatacaaaagttaagcaagaacacagtgacagatgacatcctctgcacttcccccgggcatctcgacaaaaaggaattgaaagccctaaatagtgaaattctctgtccaggtttagtaaataacccatccatgccaacacagactagttaccttatggtcaccactcctgcaacaacaacaaatacggctgatactattttacgatctcttacggacgctgtgccactgtctgttctaatattgggacttctgattatgttcatcactattgttttctgtgctgcagggatagtggttcttgttcttcaccgcaggagaagatacaaaaagaaacaagtagatgagcaaatgagagacaacagtcctgtgcatcttcagtacagcatgtatggccataaaaccactcatcacactactgaaagaccctctgcctcactctatgaacagcacatggtgagccccatggttcatgtctatagaagtccatcctttggtccaaagcatctggaagaggaagaagagaggaatgagaaagaaggaagtgatgcaaaacatctccaaagaagtcttttggaacaggaaaatcattcaccactcacagggtcaaatatgaaatacaaaaccacgaaccaatcaacagaatttttatccttccaagatgccagctcattgtacagaaacattttagaaaaagaaagggaacttcagcaactgggaatcacagaatacctaaggaaaaacattgctcagctccagcctgatatggaggcacattatcctggagcccacgaagagctgaagttaatggaaacattaatgtactcacgtccaaggaaggtattagtggaacagacaaaaaatgagtattttgaacttaaagctaatttacatgctgaacctgactatttagaagtcctggagcagcaaacatgactcgagggc

SEQ ID NO: 602 - protein, 841 aa, Homo sapiens; identical to SEQ ID NO: 586

SEQ ID NO: 603 - DNA, 3766 bp, Homo sapiens
  CDS (10)..(2604)
ttgctagctatggccctcgtactcggctccctgttgctgctggggctgtgcgggaactccttttcaggagggcagccttcatccacagatgctcctaaggcttggaattatgaattgcctgcaacaaattatgagacccaagactcccataaagctggacccattggcattctctttgaactagtgcatatctttctctatgtggtacagccgcgtgatttcccagaagatactttgagaaaattcttacagaaggcatatgaatccaaaattgattatgacaagccagaaactgtaatcttaggtctaaagattgtctactatgaagcagggattattctatgctgtgtcctggggctgctgtttattattctgatgcctctggtggggtatttcttttgtatgtgtcgttgctgtaacaaatgtggtggagaaatgcaccagcgacagaaggaaaatgggcccttcctgaggaaatgctttgcaatctccctgttggtgatttgtataataataagcattggcatcttctatggttttgtggcaaatcaccaggtaagaacccggatcaaaaggagtcggaaactggcagatagcaatttcaaggacttgcgaactctcttgaatgaaactccagagcaaatcaaatatatattggcccagtacaacactaccaaggacaaggcgttcacagatctgaacagtatcaattcagtgctaggaggcggaattcttgaccgactgagacccaacatcatccctgttcttgatgagattaagtccatggcaacagcgatcaaggagaccaaagaggcgttggagaacatgaacagcaccttgaagagcttgcaccaacaaagtacacagcttagcagcagtctgaccagcgtgaaaactagcctgcggtcatctctcaatgaccctctgtgcttggtgcatccatcaagtgaaacctgcaacagcatcagattgtctctaagccagctgaatagcaaccctgaactgaggcagcttccacccgtggatgcagaacttgacaacgttaataacgttcttaggacagatttggatggcctggtccaacagggctatcaatcccttaatgatatacctgacagagtacaacgccaaaccacgactgtcgtagcaggtatcaaaagggtcttgaattccattggttcagatatcgacaatgtaactcagcgtcttcctattcaggatatactctcagcattctctgtttatgttaataacactgaaagttacatccacagaaatttacctacattggaagagtatgattcatactggtggctgggtggcctggtcatctgctctctgctgaccctcatcgtgattttttactacctgggcttactgtgtggcgtgtgcggctatgacaggcatgccaccccgaccacccgaggctgtgtctccaacaccggaggcgtcttcctcatggttggagttggattaagtttcctcttttgctggatattgatgatcattgtggttcttacctttgtctttggtgcaaatgtggaaaaactgatctgtgaaccttacacgagcaaggaattattccgggttttggatacaccctacttactaaatgaagactgggaatactatctctctgggaagctatttaataaatcaaaaatgaagctcacttttgaacaagtttacagtgactgcaaaaaaaatagaggcacttacggcactcttcacctgcagaacagcttcaatatcagtgaacatctcaacattaatgagcatactggaagcataagcagtgaattggaaagtctgaaggtaaatcttaatatctttctgttgggtgcagcaggaagaaaaaaccttcaggattttgctgcttgtggaatagacagaatgaattatgacagctacttggctcagactggtaaatcccccgcaggagtgaatcttttatcatttgcatatgatctagaagcaaaagcaaacagtttgcccccaggaaatttgaggaactccctgaaaagagatgcacaaactattaaaacaattcaccagcaacgagtccttcctatagaacaatcactgagcactctataccaaagcgtcaagatacttcaacgcacagggaatggattgttggagagagtaactaggattctagcttctctggattttgctcagaacttcatcacaaacaatacttcctctgttattattgaggaaactaagaagtatgggagaacaataataggatattttgaacattatctgcagtggatcgagttctctatcagtgagaaagtggcatcgtgcaaacctgtggccaccgctctagatactgctgttgatgtctttctgtgtagctacattatcgaccccttgaatttgttttggtttggcataggaaaagctactgtatttttacttccggctctaatttttgcggtaaaactggctaagtactatcgtcgaatggattcggaggacgtgtacgatgatgttgaaactatacccatgaaaaatatggaaaatggtaataatggttatcataaagatcatgtatatggtattcacaatcctgttatgacaagcccatcacaacattgatagctgatgttgaaactgcttgagcatcaggatactcaaagtggaaaggatcacagatttttggtagtttctgggtctacaaggactttccaaatccaggagcaacgccagtggcaacgtagtgactcaggcgggcaccaaggcaacggcaccattggtctctgggtagtgctttaagaatgaacacaatcacgttatagtccatggtccatcactattcaaggatgactccctcccttcctgtctatttttgttttttacttttttacactgagtttctatttagacactacaacatatggggtgtttgttcccattggatgcatttctatcaaaactctatcaaatgtgatggctagattctaacatattgccatgtgtggagtgtgctgaacacacaccagtttacaggaaagatgcattttgtgtacagtaaacggtgtatataccttttgttaccacagagttttttaaacaaatgagtattataggactttcttctaaatgagctaaataagtcaccattgacttcttggtgctgttgaaaataatccattttcactaaaagtgtgtgaaacctacagcatattcttcacgcagagattttcatctattatactttatcaaagattggccatgttccacttggaaatggcatgcaaaagccatcatagagaaacctgcgtaactccatctgacaaattcaaaagagagagagagatcttgagagagaaatgctgttcgttcaaaagtggagttgttttaacagatgccaattacggtgtacagtttaacagagttttctgttgcattaggataaacattaattggagtgcagctaacatgagtatcatcagactagtatcaagtgttctaaaatgaaatatgagaagatcctgtcacaattcttagatctggtgtccagcatggatgaaacctttgagtttggtccctaaatttgcatgaaagcacaaggtaaatattcatttgcttcaggagtttcatgttggatctgtcattatcaaaagtgatcagcaatgaagaactggtcggacaaaatttaacgttgatgtaatggaattccagatgtaggcattccccccaggtcttttcatgtgcagattgcagttctgattcatttgaataaaaaggaacttgg

SEQ ID NO: 604 - protein, 865 aa, Homo sapiens
MALVLGSLLLLGLCGNSFSGGQPSSTDAPKAWNYELPATNYETQDSHKAGPIGILFELVHIFLYVVQPRDFPEDTLRKFLQKAYESKIDYDKPETVILGLKIVYYEAGIILCCVLGLLFIILMPLVGYFFCMCRCCNKCGGEMHQRQKENGPFLRKCFAISLLVICIIISIGIFYGFVANHQVRTRIKRSRKLADSNFKDLRTLLNETPEQIKYILAQYNTTKDKAFTDLNSINSVLGGGILDRLRPNIIPVLDEIKSMATAIKETKEALENMNSTLKSLHQQSTQLSSSLTSVKTSLRSSLNDPLCLVHPSSETCNSIRLSLSQLNSNPELRQLPPVDAELDNVNNVLRTDLDGLVQQGYQSLNDIPDRVQRQTTTVVAGIKRVLNSIGSDIDNVTQRLPIQDILSAFSVYVNNTESYIHRNLPTLEEYDSYWWLGGLVICSLLTLIVIFYYLGLLCGVCGYDRHATPTTRGCVSNTGGVFLMVGVGLSFLFCWILMIIVVLTFVFGANVEKLICEPYTSKELFRVLDTPYLLNEDWEYYLSGKLFNKSKMKLTFEQVYSDCKKNRGTYGTLHLQNSFNISEHLNINEHTGSISSELESLKVNLNIFLLGAAGRKNLQDFAACGIDRMNYDSYLAQTGKSPAGVNLLSFAYDLEAKANSLPPGNLRNSLKRDAQTIKTIHQQRVLPIEQSLSTLYQSVKILQRTGNGLLERVTRILASLDFAQNFITNNTSSVIIEETKKYGRTIIGYFEHYLQWIEFSISEKVASCKPVATALDTAVDVFLCSYIIDPLNLFWFGIGKATVFLLPALIFAVKLAKYYRRMDSEDVYDDVETIPMKNMENGNNGYHKDHVYGIHNPVMTSPSQH

SEQ ID NO: 605 - DNA, 3825 bp, Homo sapiens
  CDS (69)..(2663)
  misc_feature (2)..(2): Wherein n may be a, c, g or t
  misc_feature (3)..(3): Wherein n may be a, c, g or t
  misc_feature (4)..(4): Wherein n may be a, c, g or t
  misc_feature (5)..(5): Wherein n may be a, c, g or t
  misc_feature (6)..(6): Wherein n may be a, c, g or t
  misc_feature (7)..(7): Wherein n may be a, c, g or t
  misc_feature (9)..(9): Wherein n may be a, c, g or t
  misc_feature (10)..(10): Wherein n may be a, c, g or t
  misc_feature (11)..(11): Wherein n may be a, c, g or t
  misc_feature (12)..(12): Wherein n may be a, c, g or t
  misc_feature (17)..(17): Wherein n may be a, c, g or t
  misc_feature (19)..(19): Wherein n may be a, c, g or t
  misc_feature (22)..(22): Wherein n may be a, c, g or t
  misc_feature (25)..(25): Wherein n may be a, c, g or t
  misc_feature (28)..(28): Wherein n may be a, c, g or t
  misc_feature (29)..(29): Wherein n may be a, c, g or t
  misc_feature (30)..(30): Wherein n may be a, c, g or t
gnnnnnnannnnattcntncantgnacnnnaccaagttctacctcatgtttggaggatcttgctagctatggccctcgtactcggctccctgttgctgctggggctgtgcgggaactccttttcaggagggcagccttcatccacagatgctcctaaggcttggaattatgaattgcctgcaacaaattatgagacccaagactcccataaagctggacccattggcattctctttgaactagtgcatatctttctctatgtggtacagccgcgtgatttcccagaagatactttgagaaaattcttacagaaggcatatgaatccaaaattgattatgacaagccagaaactgtaatcttaggtctaaagattgtctactatgaagcagggattattctatgctgtgtcctggggctgctgtttattattctgatgcctctggtggggtatttcttttgtatgtgtcgttgctgtaacaaatgtggtggagaaatgcaccagcgacagaaggaaaatgggcccttcctgaggaaatgctttgcaatctccctgttggtgatttgtataataataagcattggcatcttctatggttttgtggcaaatcaccaggtaagaacccggatcaaaaggagtcggaaactggcagatagcaatttcaaggacttgcgaactctcttgaatgaaactccagagcaaatcaaatatatattggcccagtacaacactaccaaggacaaggcgttcacagatctgaacagtatcaattcagtgctaggaggcggaattcttgaccgactgagacccaacatcatccctgttcttgatgagattaagtccatggcaacagcgatcaaggagaccaaagaggcgttggagaacatgaacagcaccttgaagagcttgcaccaacaaagtacacagcttagcagcagtctgaccagcgtgaaaactagcctgcggtcatctctcaatgaccctctgtgcttggtgcatccatcaagtgaaacctgcaacagcatcagattgtctctaagccagctgaatagcaaccctgaactgaggcagcttccacccgtggatgcagaacttgacaacgttaataacgttcttaggacagatttggatggcctggtccaacagggctatcaatcccttaatgatatacctgacagagtacaacgccaaaccacgactgtcgtagcaggtatcaaaagggtcttgaattccattggttcagatatcgacaatgtaactcagcgtcttcctattcaggatatactctcagcattctctgtttatgttaataacactgaaagttacatccacagaaatttacctacattggaagagtatgattcatactggtggctgggtggcctggtcatctgctctctgctgaccctcatcgtgattttttactacctgggcttactgtgtggcgtgtgcggctatgacaggcatgccaccccgaccacccgaggctgtgtctccaacaccggaggcgtcttcctcatggttggagttggattaagtttcctcttttgctggatattgatgatcattgtggttcttacctttgtctttggtgcaaatgtggaaaaactgatctgtgaaccttacacgagcaaggaattattccgggttttggatacaccctacttactaaatgaagactgggaatactatctctctgggaagctatttaataaatcaaaaatgaagctcacttttgaacaagtttacagtgactgcaaaaaaaatagaggcacttacggcactcttcacctgcagaacagcttcaatatcagtgaacatctcaacattaatgagcatactggaagcataagcagtgaattggaaagtctgaaggtaaatcttaatatctttctgttgggtgcagcaggaagaaaaaaccttcaggattttgctgcttgtggaatagacagaatgaattatgacagctacttggctcagactggtaaatcccccgcaggagtgaatcttttatcatttgcatatgatctagaagcaaaagcaaacagtttgcccccaggaaatttgaggaactccctgaaaagagatgcacaaactattaaaacaattcaccagcaacgagtccttcctatagaacaatcactgagcactctataccaaagcgtcaagatacttcaacgcacagggaatggattgttggagagagtaactaggattctagcttctctggattttgctcagaacttcatcacaaacaatacttcctctgttattattgaggaaactaagaagtatgggagaacaataataggatattttgaacattatctgcagtggatcgagttctctatcagtgagaaagtggcatcgtgcaaacctgtggccaccgctctagatactgctgttgatgtctttctgtgtagctacattatcgaccccttgaatttgttttggtttggcataggaaaagctactgtatttttacttccggctctaatttttgcggtaaaactggctaagtactatcgtcgaatggattcggaggacgtgtacgatgatgttgaaactatacccatgaaaaatatggaaaatggtaataatggttatcataaagatcatgtatatggtattcacaatcctgttatgacaagcccatcacaacattgatagctgatgttgaaactgcttgagcatcaggatactcaaagtggaaaggatcacagatttttggtagtttctgggtctacaaggactttccaaatccaggagcaacgccagtggcaacgtagtgactcaggcgggcaccaaggcaacggcaccattggtctctgggtagtgctttaagaatgaacacaatcacgttatagtccatggtccatcactattcaaggatgactccctcccttcctgtctatttttgttttttacttttttacactgagtttctatttagacactacaacatatggggtgtttgttcccattggatgcatttctatcaaaactctatcaaatgtgatggctagattctaacatattgccatgtgtggagtgtgctgaacacacaccagtttacaggaaagatgcattttgtgtacagtaaacggtgtatataccttttgttaccacagagttttttaaacaaatgagtattataggactttcttctaaatgagctaaataagtcaccattgacttcttggtgctgttgaaaataatccattttcactaaaagtgtgtgaaacctacagcatattcttcacgcagagattttcatctattatactttatcaaagattggccatgttccacttggaaatggcatgcaaaagccatcatagagaaacctgcgtaactccatctgacaaattcaaaagagagagagagatcttgagagagaaatgctgttcgttcaaaagtggagttgttttaacagatgccaattacggtgtacagtttaacagagttttctgttgcattaggataaacattaattggagtgcagctaacatgagtatcatcagactagtatcaagtgttctaaaatgaaatatgagaagatcctgtcacaattcttagatctggtgtccagcatggatgaaacctttgagtttggtccctaaatttgcatgaaagcacaaggtaaatattcatttgcttcaggagtttcatgttggatctgtcattatcaaaagtgatcagcaatgaagaactggtcggacaaaatttaacgttgatgtaatggaattccagatgtaggcattccccccaggtcttttcatgtgcagattgcagttctgattcatttgaataaaaaggaacttgg

SEQ ID NO: 606 - protein, 865 aa, Homo sapiens; identical to SEQ ID NO: 604

SEQ ID NO: 607 - DNA, 756 bp, Homo sapiens
  CDS (1)..(756)
caggtaagaacccggatcaaaaggagtcggaaactggcagatagcaatttcaaggacttgcgaactctcttgaatgaaactccagagcaaatcaaatatatattggcccagtacaacactaccaaggacaaggcgttcacagatctgaacagtatcaattcagtgctaggaggcggaattcttgaccgactgagacccaacatcatccctgttcttgatgagattaagtccatggcaacagcgatcaaggagaccaaagaggcgttggagaacatgaacagcaccttgaagagcttgcaccaacaaagtacacagcttagcagcagtctgaccagcgtgaaaactagcctgcggtcatctctcaatgaccctctgtgcttggtgcatccatcaagtgaaacctgcaacagcatcagattgtctctaagccagctgaatagcaaccctgaactgaggcagcttccacccgtggatgcagaacttgacaacgttaataacgttcttaggacagatttggatggcctggtccaacagggctatcaatcccttaatgatatacctgacagagtacaacgccaaaccacgactgtcgtagcaggtatcaaaagggtcttgaattccattggttcagatatcgacaatgtaactcagcgtcttcctattcaggatatactctcagcattctctgtttatgttaataacactgaaagttacatccacagaaatttacctacattggaagagtatgattcatac

SEQ ID NO: 608 - protein, 252 aa, Homo sapiens
QVRTRIKRSRKLADSNFKDLRTLLNETPEQIKYILAQYNTTKDKAFTDLNSINSVLGGGILDRLRPNIIPVLDEIKSMATAIKETKEALENMNSTLKSLHQQSTQLSSSLTSVKTSLRSSLNDPLCLVHPSSETCNSIRLSLSQLNSNPELRQLPPVDAELDNVNNVLRTDLDGLVQQGYQSLNDIPDRVQRQTTTVVAGIKRVLNSIGSDIDNVTQRLPIQDILSAFSVYVNNTESYIHRNLPTLEEYDSY

SEQ ID NO: 609 - DNA, 765 bp, Homo sapiens
  CDS (1)..(765)
tgtgaaccttacacgagcaaggaattattccgggttttggatacaccctacttactaaatgaagactgggaatactatctctctgggaagctatttaataaatcaaaaatgaagctcacttttgaacaagtttacagtgactgcaaaaaaaatagaggcacttacggcactcttcacctgcagaacagcttcaatatcagtgaacatctcaacattaatgagcatactggaagcataagcagtgaattggaaagtctgaaggtaaatcttaatatctttctgttgggtgcagcaggaagaaaaaaccttcaggattttgctgcttgtggaatagacagaatgaattatgacagctacttggctcagactggtaaatcccccgcaggagtgaatcttttatcatttgcatatgatctagaagcaaaagcaaacagtttgcccccaggaaatttgaggaactccctgaaaagagatgcacaaactattaaaacaattcaccagcaacgagtccttcctatagaacaatcactgagcactctataccaaagcgtcaagatacttcaacgcacagggaatggattgttggagagagtaactaggattctagcttctctggattttgctcagaacttcatcacaaacaatacttcctctgttattattgaggaaactaagaagtatgggagaacaataataggatattttgaacattatctgcagtggatcgagttctctatcagtgagaaagtggcatcgtgcaaacct

SEQ ID NO: 610 - protein, 255 aa, Homo sapiens
CEPYTSKELFRVLDTPYLLNEDWEYYLSGKLFNKSKMKLTFEQVYSDCKKNRGTYGTLHLQNSFNISEHLNINEHTGSISSELESLKVNLNIFLLGAAGRKNLQDFAACGIDRMNYDSYLAQTGKSPAGVNLLSFAYDLEAKANSLPPGNLRNSLKRDAQTIKTIHQQRVLPIEQSLSTLYQSVKILQRTGNGLLERVTRILASLDFAQNFITNNTSSVIIEETKKYGRTIIGYFEHYLQWIEFSISEKVASCKP

SEQ ID NO: 611 - DNA, 2523 bp, Homo sapiens
  CDS (7)..(2517)
ggatccggagggcagccttcatccacagatgctcctaaggcttggaattatgaattgcctgcaacaaattatgagacccaagactcccataaagctggacccattggcattctctttgaactagtgcatatctttctctatgtggtacagccgcgtgatttcccagaagatactttgagaaaattcttacagaaggcatatgaatccaaaattgattatgacaagattgtctactatgaagcagggattattctatgctgtgtcctggggctgctgtttattattctgatgcctctggtggggtatttcttttgtatgtgtcgttgctgtaacaaatgtggtggagaaatgcaccagcgacagaaggaaaatgggcccttcctgaggaaatgctttgcaatctccctgttggtgatttgtataataataagcattggcatcttctatggttttgtggcaaatcaccaggtaagaacccggatcaaaaggagtcggaaactggcagatagcaatttcaaggacttgcgaactctcttgaatgaaactccagagcaaatcaaatatatattggcccagtacaacactaccaaggacaaggcgttcacagatctgaacagtatcaattcagtgctaggaggcggaattcttgaccgactgagacccaacatcatccctgttcttgatgagattaagtccatggcaacagcgatcaaggagaccaaagaggcgttggagaacatgaacagcaccttgaagagcttgcaccaacaaagtacacagcttagcagcagtctgaccagcgtgaaaactagcctgcggtcatctctcaatgaccctctgtgcttggtgcatccatcaagtgaaacctgcaacagcatcagattgtctctaagccagctgaatagcaaccctgaactgaggcagcttccacccgtggatgcagaacttgacaacgttaataacgttcttaggacagatttggatggcctggtccaacagggctatcaatcccttaatgatatacctgacagagtacaacgccaaaccacgactgtcgtagcaggtatcaaaagggtcttgaattccattggttcagatatcgacaatgtaactcagcgtcttcctattcaggatatactctcagcattctctgtttatgttaataacactgaaagttacatccacagaaatttacctacattggaagagtatgattcatactggtggctgggtggcctggtcatctgctctctgctgaccctcatcgtgattttttactacctgggcttactgtgtggcgtgtgcggctatgacaggcatgccaccccgaccacccgaggctgtgtctccaacaccggaggcgtcttcctcatggttggagttggattaagtttcctcttttgctggatattgatgatcattgtggttcttacctttgtctttggtgcaaatgtggaaaaactgatctgtgaaccttacacgagcaaggaattattccgggttttggatacaccctacttactaaatgaagactgggaatactatctctctgggaagctatttaataaatcaaaaatgaagctcacttttgaacaagtttacagtgactgcaaaaaaaatagaggcacttacggcactcttcacctgcagaacagcttcaatatcagtgaacatctcaacattaatgagcatactggaagcataagcagtgaattggaaagtctgaaggtaaatcttaatatctttctgttgggtgcagcaggaagaaaaaaccttcaggattttgctgcttgtggaatagacagaatggattatgacagctacttggctcagactggtaaatcccccgcaggagtgaatcttttatcatttgcatatgatctagaagcaaaagcaaacagtttgcccccaggaaatttgaggaactccctgaaaagagatgcacaaactattaaaacaattcaccagcaacgagtccttcctatagaacaatcactgagcactctataccaaagcgtcaagatacttcaacgcacagggaatggattgttggagagagtaactaggactctagcttctctggattttgctcagaacttcatcacaaacaatacttcctctgttattattgaggaaactaagaagtatgggaggacaataataggatattttgaacattatctgcagtggatcgagttctctatcagtgagaaagtggcatcgtgcaaacctgtggccaccgctctagatactgctgttgatgtctttctgtgtagctacattatcgaccccttgaatttgttttggtttggcataggaaaagctactgtatttttacttccggctctaatttttgcggtaaaactggctaagtactatcgtcgaatggattcggaggacgtgtacgatgatgttgaaactatacccatgaaaaatatggaaaatggtaataatggttatcataaagatcatgtatatggtattcacaatcctgttatgacaagcccatcacaacatctcgag

SEQ ID NO: 612 - protein, 837 aa, Homo sapiens
GGQPSSTDAPKAWNYELPATNYETQDSHKAGPIGILFELVHIFLYVVQPRDFPEDTLRKFLQKAYESKIDYDKIVYYEAGIILCCVLGLLFIILMPLVGYFFCMCRCCNKCGGEMHQRQKENGPFLRKCFAISLLVICIIISIGIFYGFVANHQVRTRIKRSRKLADSNFKDLRTLLNETPEQIKYILAQYNTTKDKAFTDLNSINSVLGGGILDRLRPNIIPVLDEIKSMATAIKETKEALENMNSTLKSLHQQSTQLSSSLTSVKTSLRSSLNDPLCLVHPSSETCNSIRLSLSQLNSNPELRQLPPVDAELDNVNNVLRTDLDGLVQQGYQSLNDIPDRVQRQTTTVVAGIKRVLNSIGSDIDNVTQRLPIQDILSAFSVYVNNTESYIHRNLPTLEEYDSYWWLGGLVICSLLTLIVIFYYLGLLCGVCGYDRHATPTTRGCVSNTGGVFLMVGVGLSFLFCWILMIIVVLTFVFGANVEKLICEPYTSKELFRVLDTPYLLNEDWEYYLSGKLFNKSKMKLTFEQVYSDCKKNRGTYGTLHLQNSFNISEHLNINEHTGSISSELESLKVNLNIFLLGAAGRKNLQDFAACGIDRMDYDSYLAQTGKSPAGVNLLSFAYDLEAKANSLPPGNLRNSLKRDAQTIKTIHQQRVLPIEQSLSTLYQSVKILQRTGNGLLERVTRTLASLDFAQNFITNNTSSVIIEETKKYGRTIIGYFEHYLQWIEFSISEKVASCKPVATALDTAVDVFLCSYIIDPLNLFWFGIGKATVFLLPALIFAVKLAKYYRRMDSEDVYDDVETIPMKNMENGNNGYHKDHVYGIHNPVMTSPSQH

SEQ ID NO: 613 - DNA, 3766 bp, Homo sapiens
  CDS (10)..(2604)
ttgctagctatggccctcgtactcggctccctgttgctgctggggctgtgcgggaactccttttcaggagggcagccttcatccacagatgctcctaaggcttggaattatgaattgcctgcaacaaattatgagacccaagactcccataaagctggacccattggcattctctttgaactagtgcatatctttctctatgtggtacagccgcgtgatttcccagaagatactttgagaaaattcttacagaaggcatatgaatccaaaattgattatgacaagccagaaactgtaatcttaggtctaaagattgtctactatgaagcagggattattctatgctgtgtcctggggctgctgtttattattctgatgcctctggtggggtatttcttttgtatgtgtcgttgctgtaacaaatgtggtggagaaatgcaccagcgacagaaggaaaatgggcccttcctgaggaaatgctttgcaatctccctgttggtgatttgtataataataagcattggcatcttctatggttttgtggcaaatcaccaggtaagaacccggatcaaaaggagtcggaaactggcagatagcaatttcaaggacttgcgaactctcttgaatgaaactccagagcaaatcaaatatatattggcccagtacaacactaccaaggacaaggcgttcacagatctgaacagtatcaattcagtgctaggaggcggaattcttgaccgactgagacccaacatcatccctgttcttgatgagattaagtccatggcaacagcgatcaaggagaccaaagaggcgttggagaacatgaacagcaccttgaagagcttgcaccaacaaagtacacagcttagcagcagtctgaccagcgtgaaaactagcctgcggtcatctctcaatgaccctctgtgcttggtgcatccatcaagtgaaacctgcaacagcatcagattgtctctaagccagctgaatagcaaccctgaactgaggcagcttccacccgtggatgcagaacttgacaacgttaataacgttcttaggacagatttggatggcctggtccaacagggctatcaatcccttaatgatatacctgacagagtacaacgccaaaccacgactgtcgtagcaggtatcaaaagggtcttgaattccattggttcagatatcgacaatgtaactcagcgtcttcctattcaggatatactctcagcattctctgtttatgttaataacactgaaagttacatccacagaaatttacctacattggaagagtatgattcatactggtggctgggtggcctggtcatctgctctctgctgaccctcatcgtgattttttactacctgggcttactgtgtggcgtgtgcggctatgacaggcatgccaccccgaccacccgaggctgtgtctccaacaccggaggcgtcttcctcatggttggagttggattaagtttcctcttttgctggatattgatgatcattgtggttcttacctttgtctttggtgcaaatgtggaaaaactgatctgtgaaccttacacgagcaaggaattattccgggttttggatacaccctacttactaaatgaagactgggaatactatctctctgggaagctatttaataaatcaaaaatgaagctcacttttgaacaagtttacagtgactgcaaaaaaaatagaggcacttacggcactcttcacctgcagaacagcttcaatatcagtgaacatctcaacattaatgagcatactggaagcataagcagtgaattggaaagtctgaaggtaaatcttaatatctttctgttgggtgcagcaggaagaaaaaaccttcaggattttgctgcttgtggaatagacagaatgaattatgacagctacttggctcagactggtaaatcccccgcaggagtgaatcttttatcatttgcatatgatctagaagcaaaagcaaacagtttgcccccaggaaatttgaggaactccctgaaaagagatgcacaaactattaaaacaattcaccagcaacgagtccttcctatagaacaatcactgagcactctataccaaagcgtcaagatacttcaacgcacagggaatggattgttggagagagtaactaggattctagcttctctggattttgctcagaacttcatcacaaacaatacttcctctgttattattgaggaaactaagaagtatgggagaacaataataggatattttgaacattatctgcagtggatcgagttctctatcagtgagaaagtggcatcgtgcaaacctgtggccaccgctctagatactgctgttgatgtctttctgtgtagctacattatcgaccccttgaatttgttttggtttggcataggaaaagctactgtatttttacttccggctctaatttttgcggtaaaactggctaagtactatcgtcgaatggattcggaggacgtgtacgatgatgttgaaactatacccatgaaaaatatggaaaatggtaataatggttatcataaagatcatgtatatggtattcacaatcctgttatgacaagcccatcacaacattgatagctgatgttgaaactgcttgagcatcaggatactcaaagtggaaaggatcacagatttttggtagtttctgggtctacaaggactttccaaatccaggagcaacgccagtggcaacgtagtgactcaggcgggcaccaaggcaacggcaccattggtctctgggtagtgctttaagaatgaacacaatcacgttatagtccatggtccatcactattcaaggatgactccctcccttcctgtctatttttgttttttacttttttacactgagtttctatttagacactacaacatatggggtgtttgttcccattggatgcatttctatcaaaactctatcaaatgtgatggctagattctaacatattgccatgtgtggagtgtgctgaacacacaccagtttacaggaaagatgcattttgtgtacagtaaacggtgtatataccttttgttaccacagagttttttaaacaaatgagtattataggactttcttctaaatgagctaaataagtcaccattgacttcttggtgctgttgaaaataatccattttcactaaaagtgtgtgaaacctacagcatattcttcacgcagagattttcatctattatactttatcaaagattggccatgttccacttggaaatggcatgcaaaagcaatcatagagaaacctgcgtaactccatctgacaaattcaaaagagagagagagatcttgagagagaaatgctgttcgttcaaaagtggagttgttttaacagatgccaattacggtgtacagtttaacagagttttctgttgcattaggataaacattaattggagtgcagctaacatgagtatcatcagactagtatcaagtgttctaaaatgaaatatgagaagatcctgtcacaattcttagatctggtgtccagcatggatgaaacctttgagtttggtccctaaatttgcatgaaagcacaaggtaaatattcatttgcttcaggagtttcatgttggatctgtcattatcaaaagtgatcagcaatgaagaactggtcggacaaaatttaacgttgatgtaatggaattccagatgtaggcattccccccaggtcttttcatgtgcagattgcagttctgattcatttgaataaaaaggaacttgg

SEQ ID NO: 614 - protein, 865 aa, Homo sapiens; identical to SEQ ID NO: 604

SEQ ID NO: 615 - DNA, 3766 bp, Homo sapiens
  CDS (10)..(2604)
ttgctagctatggccctcgtactcggctccctgttgctgctggggctgtgcgggaactccttttcaggagggcagccttcatccacagatgctcctaaggcttggaattatgaattgcctgcaacaaattatgagacccaagactcccataaagctggacccattggcattctctttgaactagtgcatatctttctctatgtggtacagccgcgtgatttcccagaagatactttgagaaaattcttacagaaggcatatgaatccaaaattgattatgacaagccagaaactgtaatcttaggtctaaagattgtctactatgaagcagggattattctatgctgtgtcctggggctgctgtttattattctgatgcctctggtggggtatttcttttgtatgtgtcgttgctgtaacaaatgtggtggagaaatgcaccagcgacagaaggaaaatgggcccttcctgaggaaatgctttgcaatctccctgttggtgatttgtataataataagcattggcatcttctatggttttgtggcaaatcaccaggtaagaacccggatcaaaaggagtcggaaactggcagatagcaatttcaaggacttgcgaactctcttgaatgaaactccagagcaaatcaaatatatattggcccagtacaacactaccaaggacaaggcgttcacagatctgaacagtatcaattcagtgctaggaggcggaattcttgaccgactgagacccaacatcatccctgttcttgatgagattaagtccatggcaacagcgatcaaggagaccaaagaggcgttggagaacatgaacagcaccttgaagagcttgcaccaacaaagtacacagcttagcagcagtctgaccagcgtgaaaactagcctgcggtcatctctcaatgaccctctgtgcttggtgcatccatcaagtgaaacctgcaacagcatcagattgtctctaagccagctgaatagcaaccctgaactgaggcagcttccacccgtggatgcagaacttgacaacgttaataacgttcttaggacagatttggatggcctggtccaacagggctatcaatcccttaatgatatacctgacagagtacaacgccaaaccacgactgtcgtagcaggtatcaaaagggtcttgaattccattggttcagatatcgacaatgtaactcagcgtcttcctattcaggatatactctcagcattctctgtttatgttaataacactgaaagttacatccacagaaatttacctacattggaagagtatgattcatactggtggctgggtggcctggtcatctgctctctgctgaccctcatcgtgattttttactacctgggcttactgtgtggcgtgtgcggctatgacaggcatgccaccccgaccacccgaggctgtgtctccaacaccggaggcgtcttcctcatggttggagttggattaagtttcctcttttgctggatattgatgatcattgtggttcttacctttgtctttggtgcaaatgtggaaaaactgatctgtgaaccttacacgagcaaggaattattccgggttttggatacaccctacttactaaatgaagactgggaatactatctctctgggaagctatttaataaatcaaaaatgaagctcacttttgaacaagtttacagtgactgcaaaaaaaatagaggcacttacggcactcttcacctgcagaacagcttcaatatcagtgaacatctcaacattaatgagcatactggaagcataagcagtgaattggaaagtctgaaggtaaatcttaatatctttctgttgggtgcagcaggaagaaaaaaccttcaggattttgctgcttgtggaatagacagaatgaattatgacagctacttggctcagactggtaaatcccccgcaggagtgaatcttttatcatttgcatatgatctagaagcaaaagcaaacagtttgcccccaggaaatttgaggaactccctgaaaagagatgcacaaactattaaaacaattcaccagcaacgagtccttcctatagaacaatcactgagcactctataccaaagcgtcaagatacttcaacgcacagggaatggattgttggagagagtaactaggattctagcttctctggattttgctcagaacttcatcacaaacaatacttcctctgttattattgaggaaactaagaagtatgggagaacaataataggatattttgaacattatctgcagtggatcgagttctctatcagtgagaaagtggcatcgtgcaaacctgtggccaccgctctagatactgctgttgatgtctttctgtgtagctacattatcgaccccttgaatttgttttggtttggcataggaaaagctactgtatttttacttccggctctaatttttgcggtaaaactggctaagtactatcgtcgaatggattcggaggacgtgtacgatgatgttgaaactatacccatgaaaaatatggaaaatggtaataatggttatcataaagatcatgtatatggtattcacaatcctgttatgacaagcccatcacaacattgatagctgatgttgaaactgcttgagcatcaggatactcaaagtggaaaggatcacagatttttggtagtttctgggtctacaaggactttccaaatccaggagcaacgccagtggcaacgtagtgactcaggcgggcaccaaggcaacggcaccattggtctctgggtagtgctttaagaatgaacacaatcacgttatagtccatggtccatcactattcaaggatgactccctcccttcctgtctatttttgttttttacttttttacactgagtttctatttagacactacaacatatggggtgtttgttcccattggatgcatttctatcaaaactctatcaaatgtgatggctagattctaacatattgccatgtgtggagtgtgctgaacacacaccagtttacaggaaagatgcattttgtgtacagtaaacggtgtatataccttttgttaccacagagttttttaaacaaatgagtattataggactttcttctaaatgagctaaataagtcaccattgacttcttggtgctgttgaaaataatccattttcactaaaagtgtgtgaaacctacagcatattcttcacgcagagattttcatctattatactttatcaaagattggccatgttccacttggaaatggcatgcaaaagccatcatagagaaacctgcgtaactccatctgacaaattcaaaagagagagagagatcttgagagagaaatgctgttcgttcaaaagtggagttgttttaacagatgccaattacggtgtacagtttaacagagttttctgttgcattaggataaacattaattggagtgcagctaacatgagtatcatcagactagtatcaagtgttctaaaatgaaatatgagaagatcctgtcacaattcttagatctggtgtccagcatggatgaaacctttgagtttggtccctaaatttgcatgaaagcacaaggtaaatattcatttgcttcaggagtttcatgttggatctgtcattatcaaaagtgatcagcaatgaagaactggtcggacaaaatttaacgttgatgtaatgaaattccagatgtaggcattccccccaggtcttttcatgtgcagattgcagttctgattcatttgaataaaaaggaacttgg

SEQ ID NO: 616 - protein, 865 aa, Homo sapiens; identical to SEQ ID NO: 604

SEQ ID NO: 617 - DNA, 1336 bp, Homo sapiens
  CDS (1)..(1326)
atgggtctggccatggagcacggagggtcctacgctcgggcggggggcagctctcggggctgctggtattacctgcgctacttcttcctcttcgtctccctcatccaattcctcatcatcctggggctcgtgctcttcatggtctatggcaacgtgcacgtgagcacagagtccaacctgcaggccaccgagcgccgagccgagggcctatacagtcagctcctagggctcacggcctcccagtccaacttgaccaaggagctcaacttcaccacccgcgccaaggatgccatcatgcagatgtggctgaatgctcgccgcgacctggaccgcatcaatgccagcttccgccagtgccagggtgaccgggtaatctacacgaacaatcagaggtacatggctgccatcatcttgagtgagaagcaatgcagagatcaattcaaggacatgaacaagagctgcgatgccttgctcttcatgctgaatcagaaggtgaagacgctggaggtggagatagccaaggagaagaccatttgcactaaggataaggaaagcgtgctgctgaacaaacgcgtggcggaggaacagctggttgaatgcgtgaaaacccgggagctgcagcaccaagagcgccagctggccaaggagcaactgcaaaaggtgcaagccctctgcctgcccctggacaaggacaagtttgagatggaccttcgtaacctgtggagggactccattatcccacgcagcctggacaacctgggttacaacctctaccatcccctgggctcggaattggcctccatccgcagagcctgcgaccacatgcccagcctcatgagctccaaggtggaaggtcagtgccggagcctccgggcggatatcgaacgcgtggcccgcgagaactcagacctccaacgccagaagctggaagcccagcagggcctgcgggccagtcaggaggcgaaacagaaggtggagaaggaggctcaggcccgggaggccaagctccaagctgaatgctcccggcagacccagctagcgctggaggagaaggcggtgctgcggaaggaacgagacaacctggccaaggagctggaagagaagaagagggaggcggagcagctcaggatggagctggccatcagaaactcagccctggacacctgcatcaagaccaagtcgcagccgatgatgccagtgtcaaggcccatgggccctgtccccaacccccagcccatcgacccagctagcctggaggagttcaagaggaagatcctggagtcccagaggccccctgcaggcatccctgtagccccatccagtggctgaggaggct

SEQ ID NO: 618 - protein, 442 aa, Homo sapiens
MGLAMEHGGSYARAGGSSRGCWYYLRYFFLFVSLIQFLIILGLVLFMVYGNVHVSTESNLQATERRAEGLYSQLLGLTASQSNLTKELNFTTRAKDAIMQMWLNARRDLDRINASFRQCQGDRVIYTNNQRYMAAIILSEKQCRDQFKDMNKSCDALLFMLNQKVKTLEVEIAKEKTICTKDKESVLLNKRVAEEQLVECVKTRELQHQERQLAKEQLQKVQALCLPLDKDKFEMDLRNLWRDSIIPRSLDNLGYNLYHPLGSELASIRRACDHMPSLMSSKVEGQCRSLRADIERVARENSDLQRQKLEAQQGLRASQEAKQKVEKEAQAREAKLQAECSRQTQLALEEKAVLRKERDNLAKELEEKKREAEQLRMELAIRNSALDTCIKTKSQPMMPVSRPMGPVPNPQPIDPASLEEFKRKILESQRPPAGIPVAPSSG

SEQ ID NO: 619 - DNA, 1188 bp, Homo sapiens
  CDS (1)..(1188)
ggatccaacgtgcacgtgagcacagagtccaacctgcaggccaccgagcaccgagccgagggcctatacagtcagctcctagggctcacggcctcccagtccaacttgaccaaggagctcaacttcaccacccgcgccaaggatgccatcatgcagatgtggctgaatgctcgccgcgacctggaccgcatcaatgccagcttccgccagtgccagggtgaccgggtcatctacacgaacaatcagaggtacatggctgccatcatcttgagtgagaagcaatgcagagatcaattcaaggacatgaacaagagctgcgatgccttgctcttcatgctgaatcagaaggtgaagacgctggaggtggagatagccaaggagaagaccatttgcactaaggataaggaaagcgtgctgctgaacaaacgcgtggcggaggaacagctggttgaatgcgtgaaaacccgggagctgcagcaccaagagcgccagctggtcaaggagcaactgcaaaaggtgcaagccctctgcctgcccctggacaaggacaagtttgagatggaccttcgtaacctgtggagggactccattatcccacgcagcctggacaacctgggttacaacctctaccatcccctgggctcggaattggcctccatccgcagagcctgcgaccacatgcccagcctcatgagctccaaggtggaggagctggcccggagcctccgggcggatatcgaacgcgtggtccgcgagaactcagacctccaacgccagaagctggaagcccagcagggcctgcgggccagtcaggaggcgaaacagaaggtggagaaggaggctcaggcccgggaggccaagctccaagctgaatgctcccggcagacccagctagcgctggaggagaaggcggtgctgcggagggaacgagacaacctggccaaggagctggaagagaagaagagggaggcggagcagctcaggatggagctggccatcagaaactcagccctggacacctgcatcaagaccaagtcgcagccgatgatgccagtgtcaaggcccatgggccctgtccccaacccccagcccatcgacccagctagcctggaggagttcaagaggaagatcctggagtcccagaggccccctgcaggcatccctgtagccccatccagtggcctcgag

SEQ ID NO: 620 - protein, 396 aa, Homo sapiens
GSNVHVSTESNLQATEHRAEGLYSQLLGLTASQSNLTKELNFTTRAKDAIMQMWLNARRDLDRINASFRQCQGDRVIYTNNQRYMAAIILSEKQCRDQFKDMNKSCDALLFMLNQKVKTLEVEIAKEKTICTKDKESVLLNKRVAEEQLVECVKTRELQHQERQLVKEQLQKVQALCLPLDKDKFEMDLRNLWRDSIIPRSLDNLGYNLYHPLGSELASIRRACDHMPSLMSSKVEELARSLRADIERVVRENSDLQRQKLEAQQGLRASQEAKQKVEKEAQAREAKLQAECSRQTQLALEEKAVLRRERDNLAKELEEKKREAEQLRMELAIRNSALDTCIKTKSQPMMPVSRPMGPVPNPQPIDPASLEEFKRKILESQRPPAGIPVAPSSGLE

SEQ ID NO: 621 - DNA, 1410 bp, Homo sapiens
  CDS (1)..(1410)
gagattcccccccctcgggtctcttgggcctgtccatgcgcccccccctccgtgctccatggccagacccatggatccatgggtctggccatggagcacggagggtcctacgctcgggcggggggcagctctcggggctgctggtattacctgcgctacttcttcctcttcgtctccctcatccaattcctcatcatcctggggctcgtgctcttcatggtctatggcaacgtgcacgtgagcacagagtccaacctgcaggccaccgagcgccgagccgagggcctatacagtcagctcctagggctcacggcctcccagtccaacttgaccaaggagctcaacttcaccacccgcgccaaggatgccatcatgcagatgtggctgaatgctcgccgcgacctggaccgcatcaatgccagcttccgccagtgccagggtgaccgggtcatctacacgaacaatcagaggtacatggctgccatcatcttgagtgagaagcaatgcagagatcaattcaaggacatgaacaagagctgcgatgccttgctcttcatgctgaatcagaaggtgaagacgctggaggtggagatagccaaggagaagaccatttgcactaaggataaggaaagcgtgctgctgaacaaacgcgtggcggaggaacagctggttgaatgcgtgaaaacccgggagctgcagcaccaagagcgccagctggccaaggagcaactgcaaaaggtgcaagccctctgcctgcccctggacaaggacaagtttgagatggaccttcgtaacctgtggagggactccattatcccacgcagcctggacaacctgggttacaacctctaccatcccctgggctcggaattggcctccatccgcagagcctgcgaccacatgcccagcctcatgagctccaaggtggaggagctggcccggagcctccgggcggatatcgaacgcgtggcccgcgagaactcagacctccaacgccagaagctggaagcccagcagggcctgcgggccagtcaggaggcgaaacagaaggtggagaaggaggctcaggcccgggaggccaagctccaagctgaatgctcccggcagacccagctagcgctggaggagaaggcggtgctgcggaaggaacgagacaacctggccaaggagctggaagagaagaagagggaggcggagcagctcaggatggagctggccatcagaaactcagccctggacacctgcatcaagaccaagtcgcagccgatgatgccagtgtcaaggcccatgggccctgtccccaacccccagcccatcgacccagctagcctggaggagttcaagaggaagatcctggagtcccagaggccccctgcaggcatccctgtagccccatccagtggcctcgag

SEQ ID NO: 622 - protein, 470 aa, Homo sapiens
EIPPPRVSWACPCAPPSVLHGQTHGSMGLAMEHGGSYARAGGSSRGCWYYLRYFFLFVSLIQFLIILGLVLFMVYGNVHVSTESNLQATERRAEGLYSQLLGLTASQSNLTKELNFTTRAKDAIMQMWLNARRDLDRINASFRQCQGDRVIYTNNQRYMAAIILSEKQCRDQFKDMNKSCDALLFMLNQKVKTLEVEIAKEKTICTKDKESVLLNKRVAEEQLVECVKTRELQHQERQLAKEQLQKVQALCLPLDKDKFEMDLRNLWRDSIIPRSLDNLGYNLYHPLGSELASIRRACDHMPSLMSSKVEELARSLRADIERVARENSDLQRQKLEAQQGLRASQEAKQKVEKEAQAREAKLQAECSRQTQLALEEKAVLRKERDNLAKELEEKKREAEQLRMELAIRNSALDTCIKTKSQPMMPVSRPMGPVPNPQPIDPASLEEFKRKILESQRPPAGIPVAPSSGLE

SEQ ID NO: 623 - DNA, 1404 bp, Homo sapiens
  CDS (1)..(1404)
ttcgcccttggatccatgggtctggccatggagcacggagggtcctacgctcgggcggggggcagctctcggggctgctggtattacctgcgctacttcttcctcttcgtctccctcatccaattcctcatcatcctggggctcgtgctcttcatggtctatggcaacgtgcacgtgagcacagagtccaacctgcaggccaccgagcgccgagccgagggcctatacagtcagctcctagggctcacggcctcccagtccaacttgaccaaggagctcaacttcaccacccgcgccaaggatgccatcatgcagatgtggctgaatgctcgccgcgacctggaccgcatcaatgccagcttccgccagtgccagggtgaccgggtcatctacacgaacaatcagaggtacatggctgccatcatcttgagtgagaagcaatgcagagatcaattcaaggacatgaacaagagctgcgatgccttgctcttcatgctgaatcagaaggtgaagacgctggaggtggagatagccaaggagaagaccatttgcactaaggataaggaaagcgtgctgctgaacaaacgcgtggcggaggaacagctggttgaatgcgtgaaaacccgggagctgcggcaccaagagcgccagctggccaaggagcaactgcaaaaggtgcaagccctctgcctgcccctggacaaggacaagtttgagatggaccttcgtaacctgtggagggactccattatcccacgcagcctggacaacctgggttacaacctctaccatcccctgggctcggaattggcctccatccgcagagcctgcgaccacatgcccagcctcatgagctccaaggtggaggagctggcccggagcctccgggcggatatcgaacgcgtggcccgcgagaactcagacctccaacgccagaagctggaagcccagcagggcctgcgggccagtcaggaggcgaaacagaaggtggagaaggaggctcaggcccgggaggccaagctccaagctgaatgctcccggcagacccagctagcgctggaggagaaggcggtgctgcggaaggaacgagacaacctggccaaggagctggaagagaagaagagggaggcggagcagctcaggatggagctggccatcagaaactcagccctggacacctgcatcaagaccaagtcgcagccgatgatgccagtgtcaaggcccatgggccctgtccccaacccccagcccatcgacccagctagcctggaggagttcaagaggaagatcctggagtcccagaggccccctgcaggcatccctgtagccccatccagtggcctcgaggccactggatggggctacagggatgcctccgtgctccatggccagacccatggatcc

SEQ ID NO: 624 - protein, 468 aa, Homo sapiens
FALGSMGLAMEHGGSYARAGGSSRGCWYYLRYFFLFVSLIQFLIILGLVLFMVYGNVHVSTESNLQATERRAEGLYSQLLGLTASQSNLTKELNFTTRAKDAIMQMWLNARRDLDRINASFRQCQGDRVIYTNNQRYMAAIILSEKQCRDQFKDMNKSCDALLFMLNQKVKTLEVEIAKEKTICTKDKESVLLNKRVAEEQLVECVKTRELRHQERQLAKEQLQKVQALCLPLDKDKFEMDLRNLWRDSIIPRSLDNLGYNLYHPLGSELASIRRACDHMPSLMSSKVEELARSLRADIERVARENSDLQRQKLEAQQGLRASQEAKQKVEKEAQAREAKLQAECSRQTQLALEEKAVLRKERDNLAKELEEKKREAEQLRMELAIRNSALDTCIKTKSQPMMPVSRPMGPVPNPQPIDPASLEEFKRKILESQRPPAGIPVAPSSGLEATGWGYRDASVLHGQTHGS

SEQ ID NO: 625 - DNA, 1366 bp, Homo sapiens
  CDS (1)..(1326)
atgggtctggccatggagcacggagggtcctacgctcgggcggggggcagctctcggggctgctggtattacctgcgctacttcttcctcttcgtctccctcatccaattcctcatcatcctggggctcgtgctcttcatggtctatggcaacgtgcacgtgagcacagagtccaacctgcaggccaccgagcgccgagccgagggcctatacagtcagctcctagggctcacggcctcccagtccaacttgaccaaggagctcaacttcaccacccgcgccaaggatgccatcatgcagatgtggctgaatgctcgccgcgacctggaccgcatcaatgccagcttccgccagtgccagggtgaccgggtaatctacacgaacaatcagaggtacatggctgccatcatcttgagtgagaagcaatgcagagatcaattcaaggacatgaacaagagctgcgatgccttgctcttcatgctgaatcagaaggtgaagacgctggaggtggagatagccaaggagaagaccatttgcactaaggataaggaaagcgtgctgctgaacaaacgcgtggcggaggaacagctggttgaatgcgtgaaaacccgggagctgcagcaccaagagcgccagctggccaaggagcaactgcaaaaggtgcaagccctctgcctgcccctggacaaggacaagtttgagatggaccttcgtaacctgtggagggactccattatcccacgcagcctggacaacctgggttacaacctctaccatcccctgggctcggaattggcctccatccgcagagcctgcgaccacatgcccagcctcatgagctccaaggtggaaggtcagtgccggagcctccgggcggatatcgaacgcgtggcccgcgagaactcagacctccaacgccagaagctggaagcccagcagggcctgcgggccagtcaggaggcgaaacagaaggtggagaaggaggctcaggcccgggaggccaagctccaagctgaatgctcccggcagacccagctagcgctggaggagaaggcggtgctgcggaaggaacgagacaacctggccaaggagctggaagagaagaagagggaggcggagcagctcaggatggagctggccatcagaaactcagccctggacacctgcatcaagaccaagtcgcagccgatgatgccagtgtcaaggcccatgggccctgtccccaacccccagcccatcgacccagctagcctggaggagttcaagaggaagatcctggagtcccagaggccccctgcaggcatccctgtagccccatccagtggctgaggaggctccggcactgacctaagggcgaatcccagca

SEQ ID NO: 626 - protein, 442 aa, Homo sapiens; identical to SEQ ID NO: 618

SEQ ID NO: 627 - DNA, 1367 bp, Homo sapiens
  CDS (1)..(1326)
atgggtctggccatggagcacggagggtcctacgctcgggcggggggcagctctcggggctgctggtattacctgcgctacttcttcctcttcgtctccctcatccaattcctcatcatcctggggctcgtgctcttcatggtctatggcaacgtgcacgtgagcacagagtccaacctgcaggccaccgagcgccgagccgagggcctatacagtcagctcctagggctcacggcctcccagtccaacttgaccaaggagctcaacttcaccacccgcgccaaggatgccatcatgcagatgtggctgaatgctcgccgcgacctggaccgcatcaatgccagcttccgccagtgccagggtgaccgggtaatctacacgaacaatcagaggtacatggctgccatcatcttgagtgagaagcaatgcagagatcaattcaaggacatgaacaagagctgcgatgccttgctcttcatgctgaatcagaaggtgaagacgctggaggtggagatagccaaggagaagaccatttgcactaaggataaggaaagcgtgctgctgaacaaacgcgtggcggaggaacagctggttgaatgcgtgaaaacccgggagctgcagcaccaagagcgccagctggccaaggagcaactgcaaaaggtgcaagccctctgcctgcccctggacaaggacaagtttgagatggaccttcgtaacctgtggagggactccattatcccacgcagcctggacaacctgggttacaacctctaccatcccctgggctcggaattggcctccatccgcagagcctgcgaccacatgcccagcctcatgagctccaaggtggaaggtcagtgccggagcctccgggcggatatcgaacgcgtggcccgcgagaactcagacctccaacgccagaagctggaagcccagcagggcctgcgggccagtcaggaggcgaaacagaaggtggagaaggaggctcaggcccgggaggccaagctccaagctgaatgctcccggcagacccagctagcgctggaggagaaggcggtgctgcggaaggaacgagacaacctggccaaggagctggaagagaagaagagggaggcggagcagctcaggatggagctggccatcagaaactcagccctggacacctgcatcaagaccaagtcgcagccgatgatgccagtgtcaaggcccatgggccctgtccccaacccccagcccatcgacccagctagcctggaggagttcaagaggaagatcctggagtcccagaggccccctgcaggcatccctgtagccccatccagtggctgaggaggctccggcactgacctaagggcgaatcccagcaa

SEQ ID NO: 628 - protein, 442 aa, Homo sapiens; identical to SEQ ID NO: 618

SEQ ID NO: 629 - DNA, 1367 bp, Homo sapiens; identical to SEQ ID NO: 627
  CDS (1)..(1326)

SEQ ID NO: 630 - protein, 442 aa, Homo sapiens; identical to SEQ ID NO: 618

SEQ ID NO: 631 - DNA, 1188 bp, Homo sapiens; identical to SEQ ID NO: 619
  CDS (7)..(1182)

SEQ ID NO: 632 - protein, 392 aa, Homo sapiens
NVHVSTESNLQATEHRAEGLYSQLLGLTASQSNLTKELNFTTRAKDAIMQMWLNARRDLDRINASFRQCQGDRVIYTNNQRYMAAIILSEKQCRDQFKDMNKSCDALLFMLNQKVKTLEVEIAKEKTICTKDKESVLLNKRVAEEQLVECVKTRELQHQERQLVKEQLQKVQALCLPLDKDKFEMDLRNLWRDSIIPRSLDNLGYNLYHPLGSELASIRRACDHMPSLMSSKVEELARSLRADIERVVRENSDLQRQKLEAQQGLRASQEAKQKVEKEAQAREAKLQAECSRQTQLALEEKAVLRRERDNLAKELEEKKREAEQLRMELAIRNSALDTCIKTKSQPMMPVSRPMGPVPNPQPIDPASLEEFKRKILESQRPPAGIPVAPSSG

SEQ ID NO: 633 - DNA, 1188 bp, Homo sapiens
  CDS (7)..(1182)
ggatccaacgtgcacgtgagcacagagtccaacctgcaggccaccgagcgccgagccgagggcctatacagtcagctcctagggctcacggcctcccagtccaacttgaccaaggagctcaacttcaccacccgcgccaaggatgccatcatgcagatgtggctgaatgctcgccgcgacctggaccgcatcaatgccagcttccgccagtgccagggtgaccgggtcatctacacgaacaatcagaggtacatggctgccatcatcttgagtgagaagcaatgcagagatcaattcaaggacatgaacaagagctgcgatgccttgctcttcatgctgaatcagaaggtgaagacgctggaggtggagatagccaaggagaagaccatttgcactaaggataaggaaagcgtgctgctgaacaaacgcgtggcggaggaacagctggttgaatgcgtgaaaacccgggagctgcagcaccaagagcgccagctggccaaggagcaactgcaaaaggtgcaagccctctgcctgcccctggacaaggacaagtttgagatggaccttcgtaacctgtggagggactccattatcccacgcagcctggacaacctgggttacaacctctaccatcccctgggctcggaattggcctccatccgcagagcctgcgaccacatgcccagcctcatgagctccaaggtggaggagctggcccggagcctccgggcggatatcgaacgcgtggcccgcgagaactcagacctccaacgccagaagctggaagcccagcagggcctgcgggccagtcaggaggcgaaacagaaggtggagaaggaggctcaggcccgggaggccaagctccaagctgaatgctcccggcagacccagctagcgctggaggagaaggcggtgctgcggaaggaacgagacaacctggccaaggagctggaagagaagaagagggaggcggagcagctcaggatggagctggccatcagaaactcagccctggacacctgcatcaagaccaagtcgcagccgatgatgccagtgtcaaggcccatgggccctgtccccaacccccagcccatcgacccagctagcctggaggagttcaagaggaagatcctggagtcccagaggccccctgcaggcatccctgtagccccatccagtggcctcgag

SEQ ID NO: 634 - protein, 392 aa, Homo sapiens
NVHVSTESNLQATERRAEGLYSQLLGLTASQSNLTKELNFTTRAKDAIMQMWLNARRDLDRINASFRQCQGDRVIYTNNQRYMAAIILSEKQCRDQFKDMNKSCDALLFMLNQKVKTLEVEIAKEKTICTKDKESVLLNKRVAEEQLVECVKTRELQHQERQLAKEQLQKVQALCLPLDKDKFEMDLRNLWRDSIIPRSLDNLGYNLYHPLGSELASIRRACDHMPSLMSSKVEELARSLRADIERVARENSDLQRQKLEAQQGLRASQEAKQKVEKEAQAREAKLQAECSRQTQLALEEKAVLRKERDNLAKELEEKKREAEQLRMELAIRNSALDTCIKTKSQPMMPVSRPMGPVPNPQPIDPASLEEFKRKILESQRPPAGIPVAPSSG

SEQ ID NO: 635 - DNA, 1410 bp, Homo sapiens; identical to SEQ ID NO: 621
  CDS (79)..(1404)

SEQ ID NO: 636 - protein, 442 aa, Homo sapiens
MGLAMEHGGSYARAGGSSRGCWYYLRYFFLFVSLIQFLIILGLVLFMVYGNVHVSTESNLQATERRAEGLYSQLLGLTASQSNLTKELNFTTRAKDAIMQMWLNARRDLDRINASFRQCQGDRVIYTNNQRYMAAIILSEKQCRDQFKDMNKSCDALLFMLNQKVKTLEVEIAKEKTICTKDKESVLLNKRVAEEQLVECVKTRELQHQERQLAKEQLQKVQALCLPLDKDKFEMDLRNLWRDSIIPRSLDNLGYNLYHPLGSELASIRRACDHMPSLMSSKVEELARSLRADIERVARENSDLQRQKLEAQQGLRASQEAKQKVEKEAQAREAKLQAECSRQTQLALEEKAVLRKERDNLAKELEEKKREAEQLRMELAIRNSALDTCIKTKSQPMMPVSRPMGPVPNPQPIDPASLEEFKRKILESQRPPAGIPVAPSSG

SEQ ID NO: 637 - DNA, 4294 bp, Homo sapiens
  CDS (103)..(2817)
gcagcggcaaccccggcgccgcggcaaggactcggagggctgagacgcggcggcggcggcgcggggagcgcggggcgcggcggccggagccccgggcccgccatgggcctccccgagccgggccctctccggcttctggcgctgctgctgctgctgctgctgctgctgctgctgcggctccagcatcttgcggcggcagcggctgatccgctgctcggcggccaagggccggccaaggagtgcgaaaaggaccaattccagtgccggaacgagcgctgcatcccctctgtgtggagatgcgacgaggacgatgactgcttagaccacagcgacgaggacgactgccccaagaagacctgtgcagacagtgacttcacctgtgacaacggccactgcatccacgaacggtggaagtgtgacggcgaggaggagtgtcctgatggctccgatgagtccgaggccacttgcacactgggcacctgccgtggggacgagttccagtgtggggatgggacatgtgtccttgcaatcaagcactgcaaccaggagcaggactgtccagatgggagtgatgaagctggctgcctacaggagtcaccctgtgagggtccccgcagatttcagtgtaagagtggcaagcgcgtggacggcgggaaagtgtgtgatgtgcagagggactgccgggactggtcggatgagcttctgaaagtgtggtgcggtgcctgtctacgcccactggctggactcagtctcctaccatccccctcctggtatctaggctcaaggccctccagtgccccctgccctgacactttctgctctgaccctctctttggattcatgtgccgtcctatggcttcacatggggcttttcgcccccaggcctctggtctacatctctacaaagtgctaagagcttgtccatcccagaggaggctgaacgagtgtctgcacaacaatggcggctgctcacacatctgcactgacctcaagattggctttgaatgcacgtgcccagcaggcttccagctcctggaccagaagacctgtggcgacattgatgagtgcaaggacccagatgcctgcagccagatctgtgtcaattacaagggctattttaagtgtgagtgctaccctggctacgagatggacctactgaccaagaactgccaagctgctgctggaaagagcccatccctaatcttcaccaaccggtacgaggtgcggaggatcgacctggtgaagcggaactattcacgcctcatccccatgctcaagaatgtcgtggcactagatgtggaagttgccaccaatcgcatctactggtgtgacctctcctaccgtaagatctatagcgcctacatggacaaggccagtgacccgaaagagcaggaggtcctcattgacgagcagttgcactctccagagggcctggcagtggactgggtccacaagcacatctactggactgactcgggcaataagaccatctcagtggccacagttgatggtggccgccgacgcactctcttcagccgtaacctcagtgaaccccgggccatcgctgttgaccccctgcgagggttcatgtattggtctgactggggggaccaggccaagattgagaaatctgggctcaacggtgtggaccggcaaacactggtgtcagacaatattgaatggcccaacggaatcaccctggatctgctgagccagcgcttgtactgggtagactccaagctacaccaactgtccagcattgacttcagtggaggcaacagaaagacgctgatctcctccactgacttcctgagccacccttttgggatagctgtgtttgaggacaaggtgttctggacagacctggagaacgaggccattttcagtgcaaatcggctcaatggcctggaaatctccatcctggctgagaacctcaacaacccacatgacattgtcatcttccatgagctgaagcagccaagagctccagatgcctgtgagctgagtgtccagcctaatggaggctgtgaatacctgtgccttcctgctcctcagatctccagccactctcccaagtacacatgtgcctgtcctgacacaatgtggctgggtccagacatgaagaggtgctaccgagcacctcaatctacctcaactacgacgttagcttctaccatgacgaggacagtacctgccaccacaagagcccccgggaccaccgtccacagatccacctaccagaaccacagcacagagacaccaagcctgacagctgcagtcccaagctcagttagtgtccccagggctcccagcatcagcccgtctaccctaagccctgcaaccagcaaccactcccagcactatgcaaatgaagacagtaagatgggctcaacagtcactgccgctgttatcgggatcatcgtgcccatagtggtgatagccctcctgtgcatgagtggatacctgatctggagaaactggaagcggaagaacaccaaaagcatgaattttgacaacccagtctacaggaaaacaacagaagaagaagatgaagatgagctccatatagggagaactgctcagattggccatgtctatcctgcagcaatcagcagctttgatcgcccactgtgggcagagccctgtcttggggagaccagagaaccggaagacccagcccctgccctcaaggagctttttgtcttgccgggggaaccaaggtcacagctgcaccaactcccgaagaaccctctttccgagctgcctgtcgtcaaatccaagcgagtggcattaagccttgaagatgatggactaccctgaggatgggatcacccccttcgtgcctcatggaattcagtcccatgcactacactctggatggtgtatgactggatgaatgggtttctatatatgggtctgtgtgagtgtatgtgtgtgtgtgattttttttttaaatttatgttgcggaaaggtaaccacaaagttatgatgaactgcaaacatccaaaggatgtgagagtttttctatgtataatgttttatacactttttaactggttgcactacccatgaggaattcgtggaatggctactgctgactaacatgatgcacataaccaaatgggggccaatggcacagtaccttactcatcatttaaaaactatatttacagaagatgtttggttgctgggggggcttttttgggttttggggcatttgttttttgtaaataagatgattatgctttgtggctatccatcaacataagtaaaaaaaaaaaaaaaacacttcaactccctcccccatttagattatttattaacatattttaaaaatcagatgagttctataaataatttagagaagtgagagtatttatttttggcatgtttggcccaccacacagactctgtgtgtgtatgtgtgtgtttatatgtgtatgtgtgtgacaggaaaatctgtagagaagaggcacatctatggctactgttcaaatacataaagataaatttattttcacacagtccacaaggggtatatcttgtagttttcagaaaagcctttggaaatctggatcaggaaatagataccatggtttgtgcaattatgtagtaaaaaaggcaaatcttttcacctctggctattcctgagaccccaggaagtcaggaaaagcctttcagctcacccatggctgctgtgactcctaccagggctttcttggctttggcgaaggtcagtgtacagacattccatggtaccagagtgctcagaaagtcaagataggatatgcctcaccctcagctactccttgttttaaagttcagctctttgagtaacttcttcaatttctttcaggacacttgggttgaattcagtaagtttcctctgaagcaccctgaagggtgccatccttacagagctaagtggagacgtttccagatcagcccaagtttactatagagactggcccaggcactgaatgtctaggacatgctgtggatgaagataaagatggtggaataggttttatcacatctcttatttctcttttccccttactctctaccatttcctttatgtggggaaacattttaaggtaataaataggttacttaccatcatatgttcatatagatgaaactaatttttggcttaagtcagaacaactggcccccaattgaagtcatatttgtggggggaaatggcatacgcaatattatattatattggatatttatgttcacacaggaatttggtttactgctttgtaaataaaagggaaaactccgggta

SEQ ID NO: 638 - protein, 905 aa, Homo sapiens
MGLPEPGPLRLLALLLLLLLLLLLRLQHLAAAAADPLLGGQGPAKECEKDQFQCRNERCIPSVWRCDEDDDCLDHSDEDDCPKKTCADSDFTCDNGHCIHERWKCDGEEECPDGSDESEATCTLGTCRGDEFQCGDGTCVLAIKHCNQEQDCPDGSDEAGCLQESPCEGPRRFQCKSGKRVDGGKVCDVQRDCRDWSDELLKVWCGACLRPLAGLSLLPSPSWYLGSRPSSAPCPDTFCSDPLFGFMCRPMASHGAFRPQASGLHLYKVLRACPSQRRLNECLHNNGGCSHICTDLKIGFECTCPAGFQLLDQKTCGDIDECKDPDACSQICVNYKGYFKCECYPGYEMDLLTKNCQAAAGKSPSLIFTNRYEVRRIDLVKRNYSRLIPMLKNVVALDVEVATNRIYWCDLSYRKIYSAYMDKASDPKEQEVLIDEQLHSPEGLAVDWVHKHIYWTDSGNKTISVATVDGGRRRTLFSRNLSEPRAIAVDPLRGFMYWSDWGDQAKIEKSGLNGVDRQTLVSDNIEWPNGITLDLLSQRLYWVDSKLHQLSSIDFSGGNRKTLISSTDFLSHPFGIAVFEDKVFWTDLENEAIFSANRLNGLEISILAENLNNPHDIVIFHELKQPRAPDACELSVQPNGGCEYLCLPAPQISSHSPKYTCACPDTMWLGPDMKRCYRAPQSTSTTTLASTMTRTVPATTRAPGTTVHRSTYQNHSTETPSLTAAVPSSVSVPRAPSISPSTLSPATSNHSQHYANEDSKMGSTVTAAVIGIIVPIVVIALLCMSGYLIWRNWKRKNTKSMNFDNPVYRKTTEEEDEDELHIGRTAQIGHVYPAAISSFDRPLWAEPCLGETREPEDPAPALKELFVLPGEPRSQLHQLPKNPLSELPVVKSKRVALSLEDDGLP

SEQ ID NO: 639 - DNA, 1079 bp, Homo sapiens
  CDS (1)..(1008)
gcggctgatccgctgctcggcggccaagggccggccaaggattgcgaaaaggaccaattccagtgccggaacgagcgctgcatcccctctgtgtggagatgcgacgaggacgatgactgcttagaccacagcgacgaggacgactgccccaagaagacctgtgcagacagtgacttcacctgtgacaacggccactgcatccacgaacggtggaagtgtgacggcgaggaggagtgtcctgatggctccgatgagtccgaggccacttgcaccaagcaggtgtgtcctgcagagaagctgggtccagacatgaagaggtgctaccgagcacctcaatctacctcaactacgacgttagcttctaccatgacgaggacagtacctgccaccacaagagcccccgggaccaccgtccacagatccacctaccagaaccacagcacagagacaccaagcctgacagctgcagtcccaagctcagttagtgtccccagggctcccagcatcagcccgtctaccctaagccctgcaaccagcaaccactcccagcactatgcaaatgaagacagtaagatgggctcaacagtcactgccgctgttatcgggatcatcgtgcccatagtggtgatagccctcctgtgcatgagtggatacctgatctggagaaactggaagcggaagaacaccaaaagcatgaattttgacaacccagtctacaggaaaacaacagaagaagaagacgaagatgagctccatatagggagaactgctcagattggccatgtctatcctgcagcaatcagcagctttgatcgcccactgtgggcagagccctgtcttggggagaccagagaaccggaagacccagcccctgccctcaaggagctttttgtcttgccgggggaaccaaggtcacagctgcaccaactcccgaagaaccctctttccgagctgcctgtcgtcaaatccaagcgagtggcattaagccttgaagatgatggactaccctgaggatgggatcacccccttcgtgcctcatggaattcagtcccatgcactacactctggatggtgtatga

SEQ ID NO: 640 - protein, 336 aa, Homo sapiens
AADPLLGGQGPAKDCEKDQFQCRNERCIPSVWRCDEDDDCLDHSDEDDCPKKTCADSDFTCDNGHCIHERWKCDGEEECPDGSDESEATCTKQVCPAEKLGPDMKRCYRAPQSTSTTTLASTMTRTVPATTRAPGTTVHRSTYQNHSTETPSLTAAVPSSVSVPRAPSISPSTLSPATSNHSQHYANEDSKMGSTVTAAVIGIIVPIVVIALLCMSGYLIWRNWKRKNTKSMNFDNPVYRKTTEEEDEDELHIGRTAQIGHVYPAAISSFDRPLWAEPCLGETREPEDPAPALKELFVLPGEPRSQLHQLPKNPLSELPVVKSKRVALSLEDDGLP

SEQ ID NO: 641 - DNA, 1983 bp, Homo sapiens
  CDS (1)..(1983)
ggatccgcggctgatccgctgctcggcggccaagggccggccaaggattgcgaaaaggaccaattccagtgccggaacgagcgctgcatcccctctgtgtggagatgcgacgaggacgatgactgcttagaccacagcgacgaggacgactgccccaagaagacctgtgcagacagtgacttcacctgtgacaacggccactgcatccacgaacggtggaagtgtgacggcgaggaggagtgtcctgatggctccgatgagtccgaggccacttgcaccaagcaggtgtgtcctgcagagaagctgagctgtggacccaccagccacaagtgtgtacctgcctcgtggcgctgcgacggggagaaggactgcgagggtggagcggatgaggccggctgtgctacctcactgggcacctgccgtggggacgagttccagtgtggggatgggacatgtgtccttgcaatcaagcactgcaaccaggagcaggactgtccagatgggagtgatgaagctggctgcctacaggggctgaacgagtgtctgcacaacaatggcggctgctcacacatctgcgctgacctcaagattggctttgaatgcacgtgcccagcaggcttccagctcctggaccagaagacctgtggcgacattgatgagtgcaaggacccagatgcctgcagccagatctgtgtcaattacaagggctattttaagtgtgagtgctaccctggctacgagatggacctactgaccaagaactgcaaggctgctgctggcaagagcccatccctaatcttcaccaaccggcacgaggtgcggaggatcgacctgatgaagcggaactattcacgcctcatccccatgctcaagaatgtcgtggcactagatgtggaagttgccaccaatcgcatctactggtgtgacctctcctaccgtaagatctatagcgcctacatggacaaggccagtgacccgaaagagcaggaggtcctcattgacgagcagttgcactctccagagggcctggcagtggactgggtccacaagcacatctactggactgactcgggcaataagaccatctcagtggccacagttgatggtggccgccgacgcactctcttcagccgtaacctcagtgaaccccgggccatcgctgttgaccccctgcgagggttcatgtattggtctgactggggggaccaggccaagattgagaaatctgggctcaacggtgtggaccggcaaacactggtgtcagacaatattgaatggcccaacggaatcaccctggatctgctgagccagcgcttgtactgggtagactccaagctacaccaactgtccagcattgacttcagtggaggcaacagaaagacgctgatctcctccactgacttcctgagccacccttttgggatagctgtgtttgaggacaaggtgttctggacagacctggagaacgaggccattttcagtgcaaatcggctcaatggcctggaaatctccatcctggctgagaacctcaacaacccacatgacattgtcatcttccatgagctgaagcagccaagagctccagatgcctgtgagctgagtgtccagcctaatggaggctgtgaatacctgtgccttcctgctcctcagatctccagccactctcccaagtacacatgtgcctgtcctgacacaatgtggctgggtccagacatgaagaggtgctaccgagcacctcaatctacctcaactacgacgttagcttctaccatgacgaggacagtacctgccaccacaagagcccccgggaccaccgtccacagatccacctaccagaaccacagcacagagacaccaagcctgacagctgcagtcccaagctcagttagtgtccccagggttcccagcatcagcccgtctaccctaagacctgcaaccagcaaccactcccagcactatgcaaatgaagacagtaagctcgag

SEQ ID NO: 642 - protein, 661 aa, Homo sapiens
GSAADPLLGGQGPAKDCEKDQFQCRNERCIPSVWRCDEDDDCLDHSDEDDCPKKTCADSDFTCDNGHCIHERWKCDGEEECPDGSDESEATCTKQVCPAEKLSCGPTSHKCVPASWRCDGEKDCEGGADEAGCATSLGTCRGDEFQCGDGTCVLAIKHCNQEQDCPDGSDEAGCLQGLNECLHNNGGCSHICADLKIGFECTCPAGFQLLDQKTCGDIDECKDPDACSQICVNYKGYFKCECYPGYEMDLLTKNCKAAAGKSPSLIFTNRHEVRRIDLMKRNYSRLIPMLKNVVALDVEVATNRIYWCDLSYRKIYSAYMDKASDPKEQEVLIDEQLHSPEGLAVDWVHKHIYWTDSGNKTISVATVDGGRRRTLFSRNLSEPRAIAVDPLRGFMYWSDWGDQAKIEKSGLNGVDRQTLVSDNIEWPNGITLDLLSQRLYWVDSKLHQLSSIDFSGGNRKTLISSTDFLSHPFGIAVFEDKVFWTDLENEAIFSANRLNGLEISILAENLNNPHDIVIFHELKQPRAPDACELSVQPNGGCEYLCLPAPQISSHSPKYTCACPDTMWLGPDMKRCYRAPQSTSTTTLASTMTRTVPATTRAPGTTVHRSTYQNHSTETPSLTAAVPSSVSVPRVPSISPSTLRPATSNHSQHYANEDSKLE

SEQ ID NO: 643 - DNA, 2537 bp, Homo sapiens
  CDS (30)..(2504)
tgttttttttcttcagtactttaaatgtcatgccactctcctggcctgtaagctttccacagagaagcctgctgccagacccattggagcttctttgtgtgttatttgtttcttttttcttgctgcttttacagctccagcatcttgcggcggcagcggctgatccgctgctcggcggccaagggccggccaaggattgcgaaaaggaccaattccagtgccggaacgagcgctgcatcccctctgtgtggagatgcgacgaggacgatgactgcttagaccacagcgacgaggacgactgccctgcagccaagaagacacctgtgagaagtgacttcacctgtgacaacggccactgcatccacgaacggtggaagtgtgacggcgaggaggagtgtcctgatggctccgatgagtccgaggccacttgcaccaagcaggtgtgtcctgcagagaagctgagctgtggacccactagccacaagtgtgtacctgcctcgtggcgctgcgacggggagaaggactgcgagggtggagcggatgaggccggctgtgctacctcactgggcacctgccgtggggacgagttccagtgtggggatgggacatgtgtccttgcaatcaagcactgcaaccaggagcaggactgtccagatgggagtgatgaagctggctgcctacaggggctgaacgagtgtctgcacaacaatggcggctgctcacacatctgcactgacctcaagattggctttgaatgcacgtgcccagcaggcttccagctcctggaccagaagacctgtggcgctggcaagagcccatccctaatcttcaccaaccggcacgaggtgcggaggatcgacctggtgaagcggaactattcacgcctcatccccatgctcaagaatgtcgtggcactagatgtggaagttgccaccaatcgcatctactggtgtgacctctcctaccgtaagatctatagcgcctacatggacaaggccagtgacccgaaagagcaggaggtcctcattgacgagcagttgcactctccagagggcctggcagtggactgggtccacaagcacatctactggactgactcgggcaataagaccatctcagtggccacagttgatggtggccgccgacgcactctcttcagccgtaacctcagtgaaccccgggccatcgctgttgaccccctgcgagggttcatgtattggtctgactggggggaccaggccaagattgagaaatctgggctcaacggtgtggaccggcaaacactggtgtcagacaatattgaatggcccaacggaatcaccttggatctgctgagccagcgcttgtactgggtagactccaagctacaccaactgtccagcattgacttcagtggaggcaacagaaagacgctgatctcctccactgacttcctgagccacccttttgggatagctgtgtttgaggacaaggtgttctggacagacctggagaacgaggccattttcagtgcaaatcggctcaatggcctggaaatctccatcctggctgagaacctgaacaacccacatgacattgtcatcttccatgagctgaagcagccaagagctccagatgcctgtgagctgagtgtccagcctaatggaggctgtgaatacctgtgccttcctgctcctcagatctccagccactctcccaagtacacatgtgcctgtcctgacacaatgtggctgggtccagacatgaagaggtgctaccgagcacctcaatctacctcaactacgacgttagcttctaccatgacgaggacagtacctgccaccacaagagcccccgggaccaccgtccacagatccacctaccagaaccacagcacagagacaccaagcctgacagctgcagtcccaagctcagttagtgtccccagggctcccagcatcagcccgtctaccctaagccctgcaaccagcaaccactcccagcacgcaaatgaagacagtaagatgggctcaacagtcactgccgctgttatcgggatcatcgtgcccatagcaaatgaagacagtaagatgggctcaacagtcactgccgctgttatcgggatcatcgtgcccataggtgatagccctcctgtgcatgagtggatacctgatctggagaaactggaagcggaagaacaccaaaagcatgaatttgacaacccagtctacaggaaaacaacagaagaagaagacgaagatgagctccatatagggagaactgctcagattggccatgtctatcctgcagcaatcagcagctttgatcgcccactgtgggcagagccctgtcttggggagaccagagaaccagaagacccagcccctgccctgaaggagctttttgtcttgccgggggaaccaaggtcacagctgcaccaactcccgaagaaccctctttccgagctgcctgtcgtcaaatccaagcagcgagtggcattaagccttgaagatgatggactaccctgaggatgggatcacccccttcgtgcctcatgg

SEQ ID NO: 644 - protein, 825 aa, Homo sapiens
MPLSWPVSFPQRSLLPDPLELLCVLFVSFFLLLLQLQHLAAAAADPLLGGQGPAKDCEKDQFQCRNERCIPSVWRCDEDDDCLDHSDEDDCPAAKKTPVRSDFTCDNGHCIHERWKCDGEEECPDGSDESEATCTKQVCPAEKLSCGPTSHKCVPASWRCDGEKDCEGGADEAGCATSLGTCRGDEFQCGDGTCVLAIKHCNQEQDCPDGSDEAGCLQGLNECLHNNGGCSHICTDLKIGFECTCPAGFQLLDQKTCGAGKSPSLIFTNRHEVRRIDLVKRNYSRLIPMLKNVVALDVEVATNRIYWCDLSYRKIYSAYMDKASDPKEQEVLIDEQLHSPEGLAVDWVHKHIYWTDSGNKTISVATVDGGRRRTLFSRNLSEPRAIAVDPLRGFMYWSDWGDQAKIEKSGLNGVDRQTLVSDNIEWPNGITLDLLSQRLYWVDSKLHQLSSIDFSGGNRKTLISSTDFLSHPFGIAVFEDKVFWTDLENEAIFSANRLNGLEISILAENLNNPHDIVIFHELKQPRAPDACELSVQPNGGCEYLCLPAPQISSHSPKYTCACPDTMWLGPDMKRCYRAPQSTSTTTLASTMTRTVPATTRAPGTTVHRSTYQNHSTETPSLTAAVPSSVSVPRAPSISPSTLSPATSNHSQHANEDSKMGSTVTAAVIGIIVPIANEDSKMGSTVTAAVIGIIVPIGDSPPVHEWIPDLEKLEAEEHQKHEFDNPVYRKTTEEEDEDELHIGRTAQIGHVYPAAISSFDRPLWAEPCLGETREPEDPAPALKELFVLPGEPRSQLHQLPKNPLSELPVVKSKQRVALSLEDDGLP

SEQ ID NO: 645 - DNA, 3039 bp, Homo sapiens
  CDS (1)..(3036)
atgggcctccccgagccgggccctctccggcttctggcgctgctgctgctgctgctgctgctgctgctgctgcggctccagcatcttgcggcggcagcggctgatccgctgctcggcggccaagggccggccaaggagtgcgaaaaggaccaattccagtgccggaacgagcgctgcatcccctctgtgtggagatgcgacgaggacgatgactgcttagaccacagcgacgaggacgactgccccaagaagacctgtgcagacagtgacttcacctgtgacaacggccactgcatccacgaacggtggaagtgtgacggcgaggaggagtgtcctgatggctccgatgagtccgaggccacttgcaccaagcaggtgtgtcctgcagagaagctgagctgtggacccaccagccacaagtgtgtacctgcctcgtggcgctgcgacggggagaaggactgcgagggtggagcggatgaggccggctgtgctaccttgtgcgccccgcacgagttccagtgcggcaaccgctcgtgcctggccgccgtgttcgtgtgcgacggcgatgacgactgtggtgacggcagcgatgagcgcggctgtgcagacccggcctgcgggccccgcgagttccgctgcggcggcgatggcggcggcgcctgcatcccggagcgctgggtctgcgaccgccagtttgactgcgaggaccgctcggacgaggcagccgagctctgcggccgcccgggccccggggccacgtccgcgcccgccgcctgcgccaccgtctcccagttcgcctgccgcagcggcgagtgcgtgcacctgggctggcgctgcgacggcgaccgcgactgcaaagacaaatcggacgaggccgactgcccactgggcacctgccgtggggacgagttccagtgtggggatgggacatgtgtccttgcaatcaagcactgcaaccaggagcaggactgtccagatgggagtgatgaagctggctgcctacaggagtcaccctgtgagggtccccgcagatttcagtgtaagagtggcaagcgcgtggacggcgggaaagtgtgtgatgtgcagagggactgccgggactggtcggatgagcttctgaaagtgtggtgcgtctcctaccatccccctcctgggctgaacgagtgtctgcacaacaatggcggctgctcacacatctgcactgacctcaagattggctttgaatgcacgtgcccagcaggcttccagctcctggaccagaagacctgtggcgacattgatgagtgcaaggacccagatgcctgcagccagatctgtgtcaattacaagggctattttaagtgtgagtgctaccctggctacgagatggacctactgaccaagaactgcaaggctgctgctggaaagagcccatccctaatcttcaccaaccggcacgaggtgcggaggatcgacctggtgaagcggaactattcacgcctcatccccatgctcaagaatgtcgtggcactagatgtggaagttgccaccaatcgcatctactggtgtgacctctcctaccgtaagatctatagcgcctacatggacaaggccagtgacccgaaagagcaggaggtcctcattgacgagcagttgcactctccagagggcctggcagtggactgggtccacaagcacatctactggactgactcgggcaataagaccatctcagtggccacagttgatggtggccgccgacgcactctcttcagccgtaacctcagtgaaccccgggccatcgctgttgaccccctgcgagggttcatgtattggtctgactggggggaccaggccaagattgagaaatctgggctcaacggtgtggaccggcaaacactggtgtcagacaatattgaatggcccaacggaatcaccctggatctgctgagccagcgcttgtactgggtagactccaagctacaccaactgtccagcattgacttcagtggaggcaacagaaagacgctgatctcctccactgacttcctgagccacccttttgggatagctgtgtttgaggacaaggtgttctggacagacctggagaacgaggccattttcagtgcaaatcggctcaatggcctggaaatctccatcctggctgagaacctcaacaacccacatgacattgtcatcttccatgagctgaagcagccaagagctccagatgcctgtgagctgagtgtccagcctaatggaggctgtgaatacctgtgccttcctgctcctcagatctccagccactctcccaagtacacatgtgcctgtcctgacacaatgtggctgggtccagacatgaagaggtgctaccgagcacctcaatctacctcaactacgacgttagcttctaccatgacgaggacagtacctgccaccacaagagcccccgggaccaccgtccacagatccacctaccagaaccacagcacagagacaccaagcctgacagctgcagtcccaagctcagttagtgtccccagggctcccagcatcagcccgtctaccctaagccctgcaaccagcaaccactcccagcactatgcaaatgaagacagtaagatgggctcaacagtcactgccgctgttatcgggatcatcgtgcccatagtggtgatagccctcctgtgcatgagtggatacctgatctggagaaactggaagcggaagaacaccaaaagcatgaattttgacaacccagtctacaggaaaacaacagaagaagaagatgaagatgagctccatatagggagaactgctcagattggccatgtctatcctgcagcaatcagcagctttgatcgcccactgtgggcagagccctgtcttggggagaccagagaaccggaagacccagcccctgccctcaaggagctttttgtcttgccgggggaaccaaggtcacagctgcaccaactcccgaagaaccctctttccgagctgcctgtcgtcaaatccaagcgagtggcattaagccttgaagatgatggactaccctga

SEQ ID NO: 646 - protein, 1012 aa, Homo sapiens
MGLPEPGPLRLLALLLLLLLLLLLRLQHLAAAAADPLLGGQGPAKECEKDQFQCRNERCIPSVWRCDEDDDCLDHSDEDDCPKKTCADSDFTCDNGHCIHERWKCDGEEECPDGSDESEATCTKQVCPAEKLSCGPTSHKCVPASWRCDGEKDCEGGADEAGCATLCAPHEFQCGNRSCLAAVFVCDGDDDCGDGSDERGCADPACGPREFRCGGDGGGACIPERWVCDRQFDCEDRSDEAAELCGRPGPGATSAPAACATVSQFACRSGECVHLGWRCDGDRDCKDKSDEADCPLGTCRGDEFQCGDGTCVLAIKHCNQEQDCPDGSDEAGCLQESPCEGPRRFQCKSGKRVDGGKVCDVQRDCRDWSDELLKVWCVSYHPPPGLNECLHNNGGCSHICTDLKIGFECTCPAGFQLLDQKTCGDIDECKDPDACSQICVNYKGYFKCECYPGYEMDLLTKNCKAAAGKSPSLIFTNRHEVRRIDLVKRNYSRLIPMLKNVVALDVEVATNRIYWCDLSYRKIYSAYMDKASDPKEQEVLIDEQLHSPEGLAVDWVHKHIYWTDSGNKTISVATVDGGRRRTLFSRNLSEPRAIAVDPLRGFMYWSDWGDQAKIEKSGLNGVDRQTLVSDNIEWPNGITLDLLSQRLYWVDSKLHQLSSIDFSGGNRKTLISSTDFLSHPFGIAVFEDKVFWTDLENEAIFSANRLNGLEISILAENLNNPHDIVIFHELKQPRAPDACELSVQPNGGCEYLCLPAPQISSHSPKYTCACPDTMWLGPDMKRCYRAPQSTSTTTLASTMTRTVPATTRAPGTTVHRSTYQNHSTETPSLTAAVPSSVSVPRAPSISPSTLSPATSNHSQHYANEDSKMGSTVTAAVIGIIVPIVVIALLCMSGYLIWRNWKRKNTKSMNFDNPVYRKTTEEEDEDELHIGRTAQIGHVYPAAISSFDRPLWAEPCLGETREPEDPAPALKELFVLPGEPRSQLHQLPKNPLSELPVVKSKRVALSLEDDGLP

SEQ ID NO: 647 - DNA, 2537 bp, Homo sapiens
  CDS (1)..(2085)
atgggcctccccgagccgggccctctccggcttctggcgctgctgctgctgctgctgctgctgctgctgctgcggctccagcatcttgcggcggcagcggctgatccgctgctcggcggccaagggccggccaaggattgcgaaaaggaccaattccagtgccggaacgagcgctgcatcccctctgtgtggagatgcgacgaggacgatgactgcttagaccacagcgacgaggacgactgccccaagaagacctgtgcagacagtgacttcacctgtgacaacggccactgcatccacgaacggtggaagtgtgacggcgaggaggagtgtcctgatggctccgatgagtccgaggccacttgcaccaagcaggtgtgtcctgcagagaagctgagctgtggacccaccagccacaagtgtgtacctgcctcgtggcgctgcgacggggagaaggactgcgagggtggagcggatgaggccggctgtgctacctcactgggcacctgccgtggggacgagttccagtgtggggatgggacatgtgtccttgcaatcaagcactgcaaccaggagcaggactgtccagatgggagtgatgaagctggctgcctacaggggctgaacgagtgtctgcacaacaatggcggctgctcacacatctgcactgacctcaagattggctttgaatgcacgtgcccagcaggcttccagctcctggaccagaagacctgtggcgacattgatgagtgcaaggacccagatgcctgcagccagatctgtgtcaattacaagggctattttaagtgtgagtgctaccctggctacgagatggacctactgaccaagaactgcaaggctgctgctggaaagagcccatccctaatcttcaccaaccggcacgaggtgcggaggatcgacctggtgaagcggaactattcacgcctcatccccatgctcaagaatgtcgtggcactagatgtggaagttgccaccaatcgcatctactggtgtgacctctcctaccgtaagatctatagcgcctacatggacaaggccagtgacccgaaagagcaggaggtcctcattgacgagcagttgcactctccagagggcctggcagtggactgggtccacaagcacatctactggactgactcgggcaataagaacatctctggtggccgccgacgcactctcttcagccgtaacctcagtgaaccccgggccatcgctgttgaccccctgcgagggttcatgtattggtctgactggggggaccaggccaagattgagaaatctgggctcaacggtgtggaccggcaaacactggtgtcagacaatattgaatggcccaacggaatcaccctggatctgctgagccagcgcttgtactgggtagactccaagctacaccaactgtccagcattgacttcagtggaggcaacagaaagacgctgatctcctccactgacttcctgagccacccttttgggatagctgtgtttgaggacaaggtgttctggacagacctggagaacgaggccattttcagtgcaaatcggctcaatggcctggaaatctccatcctggctgagaacctcaacaacccacatgacattgtcatcttccatgagctgaagcagccaagagctccagatgcctgtgagctgagtgtccagcctaatggaggctgtgaatacctgtgccttcctgctcctcagatctccagccactctcccaagtacacatgtgcctgtcctgacacaatgtggctgggtccagacatgaagaggtgctaccgagatgcaaatgaagacagtaagatgggctcaacagtcactgccgctgttatcgggatcatcgtgcccatagtggtgatagccctcctgtgcatgagtggatacctgatctggagaaactggaagcggaagaacaccaaaagcatgaattttgacaacccagtctacaggaaaacaacagaagaagaagatgaagatgagctccatatagggagaactgctcagattggccatgtctatcctgcacgagtggcattaagccttgaagatgatggactaccctgaggatgggatcacccccttcgtgcctcatggaattcagtcccatgcactacactccggatggtgtatgactggatgaatgggtttctatatatgggtctgtgtgagtgtatgtgtgtgtgtgatttttttttttaaatttatgttgcggaaaggtaaccacaaagttatgatgaactgcaaacatccaaaggatgtgagagtttttctatgtataatgttttatacactttttaactggttgcactacccatgaggaattcgtggaatggctactgctgactaacatgatgcacataaccaaatgggggccaatggcacagtaccttactcatcatttaaaaactatatttacagaagatgtttggttgctggggggcttttttaggttttgggcatttgttttttgtaaataagatgattatgctttgtggctatccatcaacataagt

SEQ ID NO: 648 - protein, 695 aa, Homo sapiens
MGLPEPGPLRLLALLLLLLLLLLLRLQHLAAAAADPLLGGQGPAKDCEKDQFQCRNERCIPSVWRCDEDDDCLDHSDEDDCPKKTCADSDFTCDNGHCIHERWKCDGEEECPDGSDESEATCTKQVCPAEKLSCGPTSHKCVPASWRCDGEKDCEGGADEAGCATSLGTCRGDEFQCGDGTCVLAIKHCNQEQDCPDGSDEAGCLQGLNECLHNNGGCSHICTDLKIGFECTCPAGFQLLDQKTCGDIDECKDPDACSQICVNYKGYFKCECYPGYEMDLLTKNCKAAAGKSPSLIFTNRHEVRRIDLVKRNYSRLIPMLKNVVALDVEVATNRIYWCDLSYRKIYSAYMDKASDPKEQEVLIDEQLHSPEGLAVDWVHKHIYWTDSGNKNISGGRRRTLFSRNLSEPRAIAVDPLRGFMYWSDWGDQAKIEKSGLNGVDRQTLVSDNIEWPNGITLDLLSQRLYWVDSKLHQLSSIDFSGGNRKTLISSTDFLSHPFGIAVFEDKVFWTDLENEAIFSANRLNGLEISILAENLNNPHDIVIFHELKQPRAPDACELSVQPNGGCEYLCLPAPQISSHSPKYTCACPDTMWLGPDMKRCYRDANEDSKMGSTVTAAVIGIIVPIVVIALLCMSGYLIWRNWKRKNTKSMNFDNPVYRKTTEEEDEDELHIGRTAQIGHVYPARVALSLEDDGLP

SEQ ID NO: 649 - DNA, 2474 bp, Homo sapiens
  CDS (30)..(2441)
tgttttttttcttcagtactttaaatgtcatgccactctcctggcctgtaagctttccacagagaagcctgctgccagacccattggagcttctttgtgtgttatttgtttcttttttcttgctgcttttacagctccagcatcttgcggcggcagcggctgatccgctgctcggcggccaagggccggccaaggattgcgaaaaggaccaattccagtgccggaacgagcgctgcatcccctctgtgtggagatgcgacgaggacgatgactgcttagaccacagcgacgaggacgactgccctgcagccaagaagacacctgtgagaagtgacttcacctgtgacaacggccactgcatccacgaacggtggaagtgtgacggcgaggaggagtgtcctgatggctccgatgagtccgaggccacttgcaccaagcaggtgtgtcctgcagagaagctgagctgtggacccactagccacaagtgtgtacctgcctcgtggcgctgcgacggggagaaggactgcgagggtggagcggatgaggccggctgtgctacctcactgggcacctgccgtggggacgagttccagtgtggggatgggacatgtgtccttgcaatcaagcactgcaaccaggagcaggactgtccagatgggagtgatgaagctggctgcctacaggggctgaacgagtgtctgcacaacaatggcggctgctcacacatctgcactgacctcaagattggctttgaatgcacgtgcccagcaggcttccagctcctggaccagaagacctgtggcgctggcaagagcccatccctaatcttcaccaaccggcacgaggtgcggaggatcgacctggtgaagcggaactattcacgcctcatccccatgctcaagaatgtcgtggcactagatgtggaagttgccaccaatcgcatctactggtgtgacctctcctaccgtaagatctatagcgcctacatggacaaggccagtgacccgaaagagcaggaggtcctcattgacgagcagttgcactctccagagggcctggcagtggactgggtccacaagcacatctactggactgactcgggcaataagaccatctcagtggccacagttgatggtggccgccgacgcactctcttcagccgtaacctcagtgaaccccgggccatcgctgttgaccccctgcgagggttcatgtattggtctgactggggggaccaggccaagattgagaaatctgggctcaacggtgtggaccggcaaacactggtgtcagacaatattgaatggcccaacggaatcaccttggatctgctgagccagcgcttgtactgggtagactccaagctacaccaactgtccagcattgacttcagtggaggcaacagaaagacgctgatctcctccactgacttcctgagccacccttttgggatagctgtgtttgaggacaaggtgttctggacagacctggagaacgaggccattttcagtgcaaatcggctcaatggcctggaaatctccatcctggctgagaacctgaacaacccacatgacattgtcatcttccatgagctgaagcagccaagagctccagatgcctgtgagctgagtgtccagcctaatggaggctgtgaatacctgtgccttcctgctcctcagatctccagccactctcccaagtacacatgtgcctgtcctgacacaatgtggctgggtccagacatgaagaggtgctaccgagcacctcaatctacctcaactacgacgttagcttctaccatgacgaggacagtacctgccaccacaagagcccccgggaccaccgtccacagatccacctaccagaaccacagcacagagacaccaagcctgacagctgcagtcccaagctcagttagtgtccccagggctcccagcatcagcccgtctaccctaagccctgcaaccagcaaccactcccagcactatgcaaatgaagacagtaagatgggctcaacagtcactgccgctgttatcgggatcatcgtgcccatagtggtgatagccctcctgtgcatgagtggatacctgatctggagaaactggaagcggaagaacaccaaaagcatgaattttgacaacccagtctacaggaaaacaacagaagaagaagacgaagatgagctccatatagggagaactgctcagattggccatgtctatcctgcagcaatcagcagctttgatcgcccactgtgggcagagccctgtcttggggagaccagagaaccggaagacccagcccctgccctcaaggagctttttgtcttgccgggggaaccaaggtcacagctgcaccaactcccgaagaaccctctttccgagctgcctgtcgtcaaatccaagcgagtggcattaagccttgaagatgatggactaccctgaggatgggatcacccccttcgtgcctcatgg

SEQ ID NO: 650 - protein, 804 aa, Homo sapiens
MPLSWPVSFPQRSLLPDPLELLCVLFVSFFLLLLQLQHLAAAAADPLLGGQGPAKDCEKDQFQCRNERCIPSVWRCDEDDDCLDHSDEDDCPAAKKTPVRSDFTCDNGHCIHERWKCDGEEECPDGSDESEATCTKQVCPAEKLSCGPTSHKCVPASWRCDGEKDCEGGADEAGCATSLGTCRGDEFQCGDGTCVLAIKHCNQEQDCPDGSDEAGCLQGLNECLHNNGGCSHICTDLKIGFECTCPAGFQLLDQKTCGAGKSPSLIFTNRHEVRRIDLVKRNYSRLIPMLKNVVALDVEVATNRIYWCDLSYRKIYSAYMDKASDPKEQEVLIDEQLHSPEGLAVDWVHKHIYWTDSGNKTISVATVDGGRRRTLFSRNLSEPRAIAVDPLRGFMYWSDWGDQAKIEKSGLNGVDRQTLVSDNIEWPNGITLDLLSQRLYWVDSKLHQLSSIDFSGGNRKTLISSTDFLSHPFGIAVFEDKVFWTDLENEAIFSANRLNGLEISILAENLNNPHDIVIFHELKQPRAPDACELSVQPNGGCEYLCLPAPQISSHSPKYTCACPDTMWLGPDMKRCYRAPQSTSTTTLASTMTRTVPATTRAPGTTVHRSTYQNHSTETPSLTAAVPSSVSVPRAPSISPSTLSPATSNHSQHYANEDSKMGSTVTAAVIGIIVPIVVIALLCMSGYLIWRNWKRKNTKSMNFDNPVYRKTTEEEDEDELHIGRTAQIGHVYPAAISSFDRPLWAEPCLGETREPEDPAPALKELFVLPGEPRSQLHQLPKNPLSELPVVKSKRVALSLEDDGLP

SEQ ID NO: 651 - DNA, 4150 bp, Homo sapiens
  CDS (103)..(2673)
gcagcggcaaccccggcgccgcggcaaggactcggagggctgagacgcggcggcggcggcgcggggagcgcggggcgcggcggccggagccccgggcccgccatgggcctccccgagccgggccctctccggcttctggcgctgctgctgctgctgctgctgctgctgctgctgcggctccagcatcttgcggcggcagcggctgatccgctgctcggcggccaagggccggccaaggagtgcgaaaaggaccaattccagtgccggaacgagcgctgcatcccctctgtgtggagatgcgacgaggacgatgactgcttagaccacagcgacgaggacgactgccccaagaagacctgtgcagacagtgacttcacctgtgacaacggccactgcatccacgaacggtggaagtgtgacggcgaggaggagtgtcctgatggctccgatgagtccgaggccacttgcacactgggcacctgccgtggggacgagttccagtgtggggatgggacatgtgtccttgcaatcaagcactgcaaccaggagcaggactgtccagatgggagtgatgaagctggctgcctacaggagtcaccctgtgagggtccccgcagatttcagtgtaagagtggcaagcgcgtggacggcgggaaagtgtgtgatgtgcagagggactgccgggactggtcggatgagcttctgaaagtgtggtgcggtgcctgtctacgcccactggctggactcagtctcctaccatccccctcctggagcccatgtccctccccagggctgaacgagtgtctgcacaacaatggcggctgctcacacatctgcactgacctcaagattggctttgaatgcacgtgcccagcaggcttccagctcctggaccagaagacctgtggcgacattgatgagtgcaaggacccagatgcctgcagccagatctgtgtcaattacaagggctattttaagtgtgagtgctaccctggctacgagatggacctactgaccaagaactgcaaggctgctgctggcaagagcccatccctaatcttcaccaaccggcacgaggtgcggaggatcgacctggtgaagcggaactattcacgcctcatccccatgctcaagaatgtcgtggcactagatgtggaagttgccaccaatcgcatctactggtgtgacctctcctaccgtaagatctatagcgcctacatggacaaggccagtgacccgaaagagcaggaggtcctcattgacgagcagttgcactctccagagggcctggcagtggactgggtccacaagcacatctactggactgactcgggcaataagaccatctcagtggccacagttgatggtggccgccgacgcactctcttcagccgtaacctcagtgaaccccgggccatcgctgttgaccccctgcgagggttcatgtattggtctgactggggggaccaggccaagattgagaaatctgggctcaacggtgtggaccggcaaacactggtgtcagacaatattgaatggcccaacggaatcaccctggatctgctgagccagcgcttgtactgggtagactccaagctacaccaactgtccagcattgacttcagtggaggcaacagaaagacgctgatctcctccactgacttcctgagccacccttttgggatagctgtgtttgaggacaaggtgttctggacagacctggagaacgaggccattttcagtgcaaatcggctcaatggcctggaaatctccatcctggctgagaacctcaacaacccacatgacattgtcatcttccatgagctgaagcagccaagagctccagatgcctgtgagctgagtgtccagcctaatggaggctgtgaatacctgtgccttcctgctcctcagatctccagccactctcccaagtacacatgtgcctgtcctgacacaatgtggctgggtccagacatgaagaggtgctaccgagcacctcaatctacctcaactacgacgttagcttctaccatgacgaggacagtacctgccaccacaagagcccccgggaccaccgtccacagatccacctaccagaaccacagcacagagacaccaagcctgacagctgcagtcccaagctcagttagtgtccccagggctcccagcatcagcccgtctaccctaagccctgcaaccagcaaccactcccagcactatgcaaatgaagacagtaagatgggctcaacagtcactgccgctgttatcgggatcatcgtgcccatagtggtgatagccctcctgtgcatgagtggatacctgatctggagaaactggaagcggaagaacaccaaaagcatgaattttgacaacccagtctacaggaaaacaacagaagaagaagatgaagatgagctccatatagggagaactgctcagattggccatgtctatcctgcagcaatcagcagctttgatcgcccactgtgggcagagccctgtcttggggagaccagagaaccggaagacccagcccctgccctcaaggagctttttgtcttgccgggggaaccaaggtcacagctgcaccaactcccgaagaaccctctttccgagctgcctgtcgtcaaatccaagcgagtggcattaagccttgaagatgatggactaccctgaggatgggatcacccccttcgtgcctcatggaattcagtcccatgcactacactctggatggtgtatgactggatgaatgggtttctatatatgggtctgtgtgagtgtatgtgtgtgtgtgattttttttttaaatttatgttgcggaaaggtaaccacaaagttatgatgaactgcaaacatccaaaggatgtgagagtttttctatgtataatgttttatacactttttaactggttgcactacccatgaggaattcgtggaatggctactgctgactaacatgatgcacataaccaaatgggggccaatggcacagtaccttactcatcatttaaaaactatatttacagaagatgtttggttgctgggggggcttttttgggttttggggcatttgttttttgtaaataagatgattatgctttgtggctatccatcaacataagtaaaaaaaaaaaaaaaacacttcaactccctcccccatttagattatttattaacatattttaaaaatcagatgagttctataaataatttagagaagtgagagtatttatttttggcatgtttggcccaccacacagactctgtgtgtgtatgtgtgtgtttatatgtgtatgtgtgtgacaggaaaatctgtagagaagaggcacatctatggctactgttcaaatacataaagataaatttattttcacacagtccacaaggggtatatcttgtagttttcagaaaagcctttggaaatctggatcaggaaatagataccatggtttgtgcaattatgtagtaaaaaaggcaaatcttttcacctctggctattcctgagaccccaggaagtcaggaaaagcctttcagctcacccatggctgctgtgactcctaccagggctttcttggctttggcgaaggtcagtgtacagacattccatggtaccagagtgctcagaaagtcaagataggatatgcctcaccctcagctactccttgttttaaagttcagctctttgagtaacttcttcaatttctttcaggacacttgggttgaattcagtaagtttcctctgaagcaccctgaagggtgccatccttacagagctaagtggagacgtttccagatcagcccaagtttactatagagactggcccaggcactgaatgtctaggacatgctgtggatgaagataaagatggtggaataggttttatcacatctcttatttctcttttccccttactctctaccatttcctttatgtggggaaacattttaaggtaataaataggttacttaccatcatatgttcatatagatgaaactaatttttggcttaagtcagaacaactggcccccaattgaagtcatatttgtggggggaaatggcatacgcaatattatattatattggatatttatgttcacacaggaatttggtttactgctttgtaaataaaagggaaaactccgggta

SEQ ID NO: 652 - protein, 857 aa, Homo sapiens
MGLPEPGPLRLLALLLLLLLLLLLRLQHLAAAAADPLLGGQGPAKECEKDQFQCRNERCIPSVWRCDEDDDCLDHSDEDDCPKKTCADSDFTCDNGHCIHERWKCDGEEECPDGSDESEATCTLGTCRGDEFQCGDGTCVLAIKHCNQEQDCPDGSDEAGCLQESPCEGPRRFQCKSGKRVDGGKVCDVQRDCRDWSDELLKVWCGACLRPLAGLSLLPSPSWSPCPSPGLNECLHNNGGCSHICTDLKIGFECTCPAGFQLLDQKTCGDIDECKDPDACSQICVNYKGYFKCECYPGYEMDLLTKNCKAAAGKSPSLIFTNRHEVRRIDLVKRNYSRLIPMLKNVVALDVEVATNRIYWCDLSYRKIYSAYMDKASDPKEQEVLIDEQLHSPEGLAVDWVHKHIYWTDSGNKTISVATVDGGRRRTLFSRNLSEPRAIAVDPLRGFMYWSDWGDQAKIEKSGLNGVDRQTLVSDNIEWPNGITLDLLSQRLYWVDSKLHQLSSIDFSGGNRKTLISSTDFLSHPFGIAVFEDKVFWTDLENEAIFSANRLNGLEISILAENLNNPHDIVIFHELKQPRAPDACELSVQPNGGCEYLCLPAPQISSHSPKYTCACPDTMWLGPDMKRCYRAPQSTSTTTLASTMTRTVPATTRAPGTTVHRSTYQNHSTETPSLTAAVPSSVSVPRAPSISPSTLSPATSNHSQHYANEDSKMGSTVTAAVIGIIVPIVVIALLCMSGYLIWRNWKRKNTKSMNFDNPVYRKTTEEEDEDELHIGRTAQIGHVYPAAISSFDRPLWAEPCLGETREPEDPAPALKELFVLPGEPRSQLHQLPKNPLSELPVVKSKRVALSLEDDGLP

SEQ ID NO: 653 - DNA, 4180 bp, Homo sapiens
  CDS (163)..(2703)
atggcctccccgaacgtatgggcctccccgagcgtatgggcctccccgagcgtatgggcctccccgagcgtatgggcctcacccgagcgtatgggcctccccgagcgtatgggcctccccgagcgtatgggcctccccgagcgtatgggcctccccgagcgtatgggcctccccgagccgggccctctccggcttctggcgctgctgctgctgctgctgctgctgctgctgctgcagctccagcatcttgcggcggcagcggctgatccgctgctcggcggccaagggccggccaaggattgcgaaaaggaccaattccagtgccggaacgagcgctgcatcccctctgtgtggagatgcgacgaggacgatgactgcttagaccacagcgacgaggacgactgccccaagaagacctgtgcagacagtgacttcacctgtgacaacggccactgcatccacgaacggtggaagtgtgacggcgaggaggagtgtcctgatggctccgatgagtccgaggccacttgcaccaagcaggtgtgtcctgcagagaagctgagctgtggacccaccagccacaagtgtgtacctgcctcgtggcgctgcgacggggagaaggactgcgagggtggagcggatgaggccggctgtgctacctcactgggcacctgccgtggggacgagttccagtgtggggatgggacatgtgtccttgcaatcaagcactgcaaccaggagcaggactgtccagatgggagtgatgaagctggctgcctacaggttccgccaacattcctgggaaacaggaggaggcccagggggctgaacgagtgtctgcacaacaatggcggctgctcacacatctgcactgacctcaagattggctttgaatgcacgtgcccagcaggcttccagctcctggaccagaagacctgtggcgacattgatgagtgcaaggacccagatgcctgcagccagatctgtgtcaattacaagggctattttaagtgtgagtgctaccctggctacgagatggacctactgaccaagaactgcaaggctgctgctggaaagagcccatccctaatcttcaccaaccggcacgaggtgcggaggatcgacctggtgaagcggaactattcacgcctcatccccatgctcaagaatgtcgtggcactagatgtggaagttgccaccaatcgcatctactggtgtgacctctcctaccgtaagatctatagcgcctacatggacaaggccagtgacccgaaagagcaggaggtcctcattgacgagcagttgcactctccagagggcctggcagtggactgggtccacaagcacatctactggactgactcgggcaataagaccatctcagtggccacagttgatggtggccgccgacgcactctcttcagccgtaacctcagtgaaccccgggccatcgctgttgaccccctgcgagggttcatgtattggtctgactggggggaccaggccaagattgagaaatctgggctcaacggtgtggaccggcaaacactggtgtcagacaatattgaatggcccaacggaatcaccctggatctgctgagccagcgcttgtactgggtagactccaagctacaccaactgtccagcattgacttcagtggaggcaacagaaagacgctgatctcctccactgacttcctgagccacccttttgggatagctgtgtttgaggacaaggtgttctggacagacctggagaacgaggccattttcagtgcaaatcggctcaatggcctggaaatctccatcctggctgagaacctcaacaacccacatgacattgtcatcttccatgagctgaagcagccaagagctccagatgcctgtgagctgagtgtccagcctaatggaggctgtgaatacctgtgccttcctgctcctcagatctccagccactctcccaagtacacatgtgcctgtcctgacacaatgtggctgggtccagacatgaagaggtgctaccgagcacctcaatctacctcaactacgacgttagcttctaccatgacgaggacagtacctgccaccacaagagcccccgggaccaccgtccacagatccacctaccagaaccacagcacagagacaccaagcctgacagctgcagtcccaagctcagttagtgtccccagggctcccagcatcagcccgtctaccctaagccctgcaaccagcaaccactcccagcactatgcaaatgaagacagtaagatgggctcaacagtcactgccgctgttatcgggatcatcgtgcccatagtggtgatagccctcctgtgcatgagtggatacctgatctggagaaactggaagcggaagaacaccaaaagcatgaattttgacaacccagtctacaggaaaacaacagaagaagaagatgaagatgagctccatatagggagaactgctcagattggccatgtctatcctgcagcaatcagcagctttgatcgcccactgtgggcagagccctgtcttggggagaccagagaaccggaagacccagcccctgccctcaaggagctttttgtcttgccgggggaaccaaggtcacagctgcaccaactcccgaagaaccctctttccgagctgcctgtcgtcaaatccaagcgagtggcattaagccttgaagatgatggactaccctgaggatgggatcacccccttcgtgcctcatggaattcagtcccatgcactacactctggatggtgtatgactggatgaatgggtttctatatatgggtctgtgtgagtgtatgtgtgtgtgtgattttttttttaaatttatgttgcggaaaggtaaccacaaagttatgatgaactgcaaacatccaaaggatgtgagagtttttctatgtataatgttttatacactttttaactggttgcactacccatgaggaattcgtggaatggctactgctgactaacatgatgcacataaccaaatgggggccaatggcacagtaccttactcatcatttaaaaactatatttacagaagatgtttggttgctgggggggcttttttgggttttggggcatttgttttttgtaaataagatgattatgctttgtggctatccatcaacataagtaaaaaaaaaaaaaaaacacttcaactccctcccccatttagattatttattaacatattttaaaaatcagatgagttctataaataatttagagaagtgagagtatttatttttggcatgtttggcccaccacacagactctgtgtgtgtatgtgtgtgtttatatgtgtatgtgtgtgacaggaaaatctgtagagaagaggcacatctatggctactgttcaaatacataaagataaatttattttcacacagtccacaaggggtatatcttgtagttttcagaaaagcctttggaaatctggatcaggaaatagataccatggtttgtgcaattatgtagtaaaaaaggcaaatcttttcacctctggctattcctgagaccccaggaagtcaggaaaagcctttcagctcacccatggctgctgtgactcctaccagggctttcttggctttggcgaaggtcagtgtacagacattccatggtaccagagtgctcagaaagtcaagataggatatgcctcaccctcagctactccttgttttaaagttcagctctttgagtaacttcttcaatttctttcaggacacttgggttgaattcagtaagtttcctctgaagcaccctgaagggtgccatccttacagagctaagtggagacgtttccagatcagcccaagtttactatagagactggcccaggcactgaatgtctaggacatgctgtggatgaagataaagatggtggaataggttttatcacatctcttatttctcttttccccttactctctaccatttcctttatgtggggaaacattttaaggtaataaataggttacttaccatcatatgttcatatagatgaaactaatttttggcttaagtcagaacaactggcccccaattgaagtcatatttgtggggggaaatggcatacgcaatattatattatattggatatttatgttcacacaggaatttggtttactgctttgtaaataaaagggaaaactccgggta

SEQ ID NO: 654 - protein, 847 aa, Homo sapiens
MGLPEPGPLRLLALLLLLLLLLLLQLQHLAAAAADPLLGGQGPAKDCEKDQFQCRNERCIPSVWRCDEDDDCLDHSDEDDCPKKTCADSDFTCDNGHCIHERWKCDGEEECPDGSDESEATCTKQVCPAEKLSCGPTSHKCVPASWRCDGEKDCEGGADEAGCATSLGTCRGDEFQCGDGTCVLAIKHCNQEQDCPDGSDEAGCLQVPPTFLGNRRRPRGLNECLHNNGGCSHICTDLKIGFECTCPAGFQLLDQKTCGDIDECKDPDACSQICVNYKGYFKCECYPGYEMDLLTKNCKAAAGKSPSLIFTNRHEVRRIDLVKRNYSRLIPMLKNVVALDVEVATNRIYWCDLSYRKIYSAYMDKASDPKEQEVLIDEQLHSPEGLAVDWVHKHIYWTDSGNKTISVATVDGGRRRTLFSRNLSEPRAIAVDPLRGFMYWSDWGDQAKIEKSGLNGVDRQTLVSDNIEWPNGITLDLLSQRLYWVDSKLHQLSSIDFSGGNRKTLISSTDFLSHPFGIAVFEDKVFWTDLENEAIFSANRLNGLEISILAENLNNPHDIVIFHELKQPRAPDACELSVQPNGGCEYLCLPAPQISSHSPKYTCACPDTMWLGPDMKRCYRAPQSTSTTTLASTMTRTVPATTRAPGTTVHRSTYQNHSTETPSLTAAVPSSVSVPRAPSISPSTLSPATSNHSQHYANEDSKMGSTVTAAVIGIIVPIVVIALLCMSGYLIWRNWKRKNTKSMNFDNPVYRKTTEEEDEDELHIGRTAQIGHVYPAAISSFDRPLWAEPCLGETREPEDPAPALKELFVLPGEPRSQLHQLPKNPLSELPVVKSKRVALSLEDDGLP

SEQ ID NO: 655 - DNA, 2656 bp, Homo sapiens
  CDS (103)..(2427)
gcagcggcaaccccggcgccgcggcaaggactcggagggctgagacgcggcggcggcggcgcggggagcgcggggcgcggcggccggagccccgggcccgccatgggcctccccgagccgggccctctccggcttctggcgctgctgctgctgctgctgctgctgctgctgctgcggctccagcatcttgcggcggcagcggctgatccgctgctcggcggccaagggccggccaaggagtgcgaaaaggaccaattccagtgccggaacgagcgctgcatcccctctgtgtggagatgcgacgaggacgatgactgcttagaccacagcgacgaggacgactgccccaagaagacctgtgcagacagtgacttcacctgtgacaacggccactgcatccacgaacggtggaagtgtgacggcgaggaggagtgtcctgatggctccgatgagtccgaggccacttgcaccaagcaggtgtgtcctgcagagaagctgagctgtggacccaccagccacaagtgtgtacctgcctcgtggcgctgcgacggggagaaggactgcgagggtggagcggatgaggccggctgtgctacctcactgggcacctgccgtggggacgagttccagtgtggggatgggacatgtgtccttgcaatcaagcactgcaaccaggagcaggactgtccagatgggagtgatgaagctggctgcctacaggggctgaacgagtgtctgcacaacaatggcggctgctcacacatctgcactgacctcaagattggctttgaatgcacgtgcccagcaggcttccagctcctggaccagaagacctgtggcgacattgatgagtgcaaggacccagatgcctgcagccagatctgtgtcaattacaagggctattttaagtgtgagtgctaccctggctacgagatggacctactgaccaagaactgcaaggctgctgctggcaagagcccatccctaatcttcaccaaccggcacgaggtgcggaggatcgacctggtgaagcggaactattcacgcctcatccccatgctcaagaatgtcgtggcactagatgtggaagttgccaccaatcgcatctactggtgtgacctctcctaccgtaagatctatagcgcctacatggacaaggccagtgacccgaaagagcaggaggtcctcattgacgagcagttgcactctccagagggcctggcagtggactgggtccacaagcacatctactggactgactcgggcaataagaccatctcagtggccacagttgatggtggccgccgacgcactctcttcagccgtaacctcagtgaaccccgggccatcgctgttggccccctgcgagggttcatgtattggtctgactggggggaccaggccaagattgagaaatctgggctcaacggtgtggaccggcaaacactggtgttagacaatattgaatggcccaacggaatcaccctggatctgctgagccagcgcttgtactgggtagactccaagctacaccaactgtccagcattgacttcagtggaggcaacagaaagacgctgatctcctccactgacttcctgagccacccttttgggatagctgtgtttgaggacaaggtgttctggacagacctggagaacgaggccattttcagtgcaaatcggctcaatggcctggaaatctccatcctggctgagaacctcaacaacccacatgacattgtcatcttccatgagctgaagcagccaagagctccagatgcctgtgagctgagtgtccagcctaatggaggctgtgaatacctgtgccttcctgctcctcagatctccagccactctcccaagtacacatgtgcctgtcctgacacaatgtggctgggcccagacatgaagaggtgctaccgagcacctcaatctacctcaactacgacgttagcttctaccatgacgaggacagtacctgccaccacaagagcccccgggaccaccgtccacagatccacctaccagaaccacagcacagagacaccaagcctgacagctgcagtcccaagctcagttagtgtccccagggctcccagcatcagcccgtctaccctaagccctgcaaccagcaaccactcccagcactatgcaaatgaagacagtaagatgggctcaacagtcactgccgctgttatcgggatcatcgtgcccatagtggtgatagccctcctgtgcatgagtggatacctgatctggagaaactggaagcggaagaacaccaaaagcatgaattttgacaacccagtctacaggaaaacaacagaagaagaagacgaagatgagctccatatagggagaactgctcagattggccatgtctatcctgcacgagtggcattaagccttgaagatgatggactaccctgaggatgggatcacccccttcgtgcctcatggaattcagtcccatgcactacactctggagggtgtatgactggatgaatgggtttctatatatgggtctgtgtgagtgtatgtgtgtgtgtgattttttttttaaatttatgttgcggaaaggtaaccacaaagttatgatgaactgcaaacatccaaaggatgtgagagtttttctatgtataatgttttatacac

SEQ ID NO: 656 - protein, 775 aa, Homo sapiens
MGLPEPGPLRLLALLLLLLLLLLLRLQHLAAAAADPLLGGQGPAKECEKDQFQCRNERCIPSVWRCDEDDDCLDHSDEDDCPKKTCADSDFTCDNGHCIHERWKCDGEEECPDGSDESEATCTKQVCPAEKLSCGPTSHKCVPASWRCDGEKDCEGGADEAGCATSLGTCRGDEFQCGDGTCVLAIKHCNQEQDCPDGSDEAGCLQGLNECLHNNGGCSHICTDLKIGFECTCPAGFQLLDQKTCGDIDECKDPDACSQICVNYKGYFKCECYPGYEMDLLTKNCKAAAGKSPSLIFTNRHEVRRIDLVKRNYSRLIPMLKNVVALDVEVATNRIYWCDLSYRKIYSAYMDKASDPKEQEVLIDEQLHSPEGLAVDWVHKHIYWTDSGNKTISVATVDGGRRRTLFSRNLSEPRAIAVGPLRGFMYWSDWGDQAKIEKSGLNGVDRQTLVLDNIEWPNGITLDLLSQRLYWVDSKLHQLSSIDFSGGNRKTLISSTDFLSHPFGIAVFEDKVFWTDLENEAIFSANRLNGLEISILAENLNNPHDIVIFHELKQPRAPDACELSVQPNGGCEYLCLPAPQISSHSPKYTCACPDTMWLGPDMKRCYRAPQSTSTTTLASTMTRTVPATTRAPGTTVHRSTYQNHSTETPSLTAAVPSSVSVPRAPSISPSTLSPATSNHSQHYANEDSKMGSTVTAAVIGIIVPIVVIALLCMSGYLIWRNWKRKNTKSMNFDNPVYRKTTEEEDEDELHIGRTAQIGHVYPARVALSLEDDGLP

SEQ ID NO: 657 - DNA, 2623 bp, Homo sapiens
  CDS (103)..(2604)
gcagcggcaaccccggcgccgcggcaaggactcggagggctgagacgcggcggcggcggcgcggggagcgcggggcgcggcggccggagccccgggcccgccatgggcctccccgagccgggccctctccggcttctggcgctgctgctgctgctgctgctgctgctgctgctgcggctccagcatcttgcggcggcagcggctgatccgctgctcggcggccaagggccggccaaggattgcgaaaaggaccaattccagtgccggaacgagcgctgcatcccctctgtgtggagatgcgacgaggacgatgactgcttagaccacagcgacgaggacgactgccccaagaagacctgtgcagacagtgacttcacctgtgacaacggccactgcatccacgaacggtggaagtgtgacggcgaggaggagtgtcctgatggctccgatgagtccgaggccacttgcaccaagcaggtgtgtcctgcagagaagctgagctgtggacccaccagccacaagtgtgtacctgcctcgtggcgctgcgacggggagaaggactgcgagggtggagcggatgaggccggctgtgctacctcactgggcacctgccgtggggacgagttccagtgtggggatgggacatgtgtccttgcaatcaagcactgcaaccaggagcaggactgtccagatgggagtgatgaagctggctgcctacaggggctgaacgagtgtctgcacaacaatggcggctgctcacacatctgcactgacctcaagattggctttgaatgcacgtgcccagcaggcttccagctcctggaccagaagacctgtggcgacattgatgagtgcaaggacccagatgcctgcagccagatctgtgtcaattacaagggctattttaagtgtgagtgctaccctggctacgagatggacctactgaccaagaactgcaaggctgctgctggcaagagcccatccctaatcttcaccaaccggcacgaggtgcggaggatcgacctggtgaagcggaactattcacgcctcatccccatgctcaagaatgtcgtggcactagatgtggaagttgccaccaatcgcatctactggtgtgacctctcctaccgtaagatctatagcgcctacatggacaaggccagtgacccgaaagagcaggaggtcctcattgacgagcagttgcactctccagagggcctggcagtggactgggtccacaagcacatctactggactgactcgggcaataagaccatctcagtggccacagttgatggtggccgccgacgcactctcttcagccgtaacctcagtgaaccccgggccatcgctgttgaccccctgcgagggttcatgtattggtctgactggggggaccaggccaagattgagaaatctgggctcaacggtgtggaccggcaaacactggtgtcagacaatattgaatggcccaacggaatcaccctggatctgctgagccagcgcttgtactgggtagactccaagctacaccaactgtccagcattgacttcagtggaggcaacagaaagacgctgatctcctccactgacttcctgagccacccttttgggatagctgtgtttgaggacaaggtgttctggacagacctggagaacgaggccattttcagtgcaaatcggctcaatggcctggaaatctccatcctggctgagaacctcaacaacccacatgacattgtcatcttccatgagctgaagcagccaagagctccagatgcctgtgagctgagtgtccagcctaatggaggctgtgaatacctgtgccttcctgctcctcagatctccagccactctcccaagtacacatgtgcctgtcctgacacaatgtggctgggtccagacatgaagaggtgctaccgagcacctcaatctacctcaactacgacgttagcttctaccatgacgaggacagtacctgccaccacaagagcccccgggaccaccgtccacagatccacctaccagaaccacagcacagagacaccaagcctgacagctgcagtcccaagctcagttagtgtccccagggctcccagcatcagcccgtctaccctaagccctgcaaccagcaaccactcccagcactatgcaaatgaagacagtaagatgggctcaacagtcactgccgctgttatcgggatcatcgtgcccatagtggtgatagccctcctgtgcatgagtggatacctgatctggagaaactggaagcggaagaacaccaaaagcatgaattttgccaacccagtctacaggaaaacaacagaagaagaagacgaagatgagctccatatagggagaactgctcagattggccatgtctatcctgcagcaatcagcagctttgatcgcccactgtgggcagagccctgtcttggggagaccagagaaccggaagacccagcccctgccctcaaggagctttttgtcttgccgggggaaccaaggtcacagctgcaccaactcccgaagaaccctctttccgagctgcctgtcgtcaaatccaagcgagtggcattaagccttgaagatgatggactaccctgaggatgggatcaccccc

SEQ ID NO: 658 - protein, 834 aa, Homo sapiens
MGLPEPGPLRLLALLLLLLLLLLLRLQHLAAAAADPLLGGQGPAKDCEKDQFQCRNERCIPSVWRCDEDDDCLDHSDEDDCPKKTCADSDFTCDNGHCIHERWKCDGEEECPDGSDESEATCTKQVCPAEKLSCGPTSHKCVPASWRCDGEKDCEGGADEAGCATSLGTCRGDEFQCGDGTCVLAIKHCNQEQDCPDGSDEAGCLQGLNECLHNNGGCSHICTDLKIGFECTCPAGFQLLDQKTCGDIDECKDPDACSQICVNYKGYFKCECYPGYEMDLLTKNCKAAAGKSPSLIFTNRHEVRRIDLVKRNYSRLIPMLKNVVALDVEVATNRIYWCDLSYRKIYSAYMDKASDPKEQEVLIDEQLHSPEGLAVDWVHKHIYWTDSGNKTISVATVDGGRRRTLFSRNLSEPRAIAVDPLRGFMYWSDWGDQAKIEKSGLNGVDRQTLVSDNIEWPNGITLDLLSQRLYWVDSKLHQLSSIDFSGGNRKTLISSTDFLSHPFGIAVFEDKVFWTDLENEAIFSANRLNGLEISILAENLNNPHDIVIFHELKQPRAPDACELSVQPNGGCEYLCLPAPQISSHSPKYTCACPDTMWLGPDMKRCYRAPQSTSTTTLASTMTRTVPATTRAPGTTVHRSTYQNHSTETPSLTAAVPSSVSVPRAPSISPSTLSPATSNHSQHYANEDSKMGSTVTAAVIGIIVPIVVIALLCMSGYLIWRNWKRKNTKSMNFANPVYRKTTEEEDEDELHIGRTAQIGHVYPAAISSFDRPLWAEPCLGETREPEDPAPALKELFVLPGEPRSQLHQLPKNPLSELPVVKSKRVALSLEDDGLP

SEQ ID NO: 659 - DNA, 4607 bp, Homo sapiens
  CDS (237)..(3125)
gctggcggcggccgcccagggccggggccgcgcgcccagcctgagcccgccccgccgccgagcgtcaccgaacctgcttgaaatgcagccgaggagccggggcgggcggcagcggcggcggcggcggcggcgggggcagcggcaaccccggcgccgcggcaaggactcggagggctgagacgcggcggcggcggcgcggggagcgcggggcgcggcggccggagcccgggcccgccatgggcctccccgagccgggccctctccggcttctggcgctgctgctgctgctgctgctgctgctgctgctgcggctccagcatcttgcggcggcagcggctgatccgctgctcggcggccaagggccggccaaggagtgcgaaaaggaccaattccagtgccggaacgagcgctgcatcccctctgtgtggagatgcgacgaggacgatgactgcttagaccacagcgacgaggacgactgccccaagaagacctgtgcagacagtgacttcacctgtgacaacggccactgcatccacgaacggtggaagtgtgacggcgaggaggagtgtcctgatggctccgatgagtccgaggccacttgcaccaagcaggtgtgtcctgcagagaagctgagctgtggacccaccagccacaagtgtgtacctgcctcgtggcgctgcgacggggagaaggactgcgagggtggagcggatgaggccggctgtgctaccttgtgcgccccgcacgagttccagtgcggcaaccgctcgtgcctggccgccgtgttcgtgtgcgacggcgatgacgactgtggtgacggcagcgatgagcgcggctgtgcagacccggcctgcgggccccgcgagttccgctgcggcggcgatggcggcggcgcctgcatcccggagcgctgggtctgcgaccgccagtttgactgcgaggaccgctcggacgaggcagccgagctctgcggccgcccgggccccggggccacgtccgcgcccgccgcctgcgccaccgtctcccagttcgcctgccgcagcggcgagtgcgtgcacctgggctggcgctgcgacggcgaccgcgactgcaaagacaaatcggacgaggccgactgcccactgggcacctgccgtggggacgagttccagtgtggggatgggacatgtgtccttgcaatcaagcactgcaaccaggagcaggactgtccagatgggagtgatgaagctggctgcctacaggggctgaacgagtgtctgcacaacaatggcggctgctcacacatctgcactgacctcaagattggctttgaatgcacgtgcccagcaggcttccagctcctggaccagaagacctgtggcgacattgatgagtgcaaggacccagatgcctgcagccagatctgtgtcaattacaagggctattttaagtgtgagtgctaccctggctacgagatggacctactgaccaagaactgcaaggctgctggtggaaagagcccatccctaatcttcaccaaccggtacgaggtgcggaggatcgacctggtgaagcggaactattcacgcctcatccccatgctcaagaatgtcgtggcactagatgtggaagttgccaccaatcgcatctactggtgtgacctctcctaccgtaagatctatagcgcctacatggacaaggccagtgacccgaaagagcaggaggtcctcattgacgagcagttgcactctccagagggcctggcagtggactgggtccacaagcacatctactggactgactcgggcaataagaccatctcagtggccacagttgatggtggccgccgacgcactctcttcagccgtaacctcagtgaaccccgggccatcgctgttgaccccctgcgagggttcatgtattggtctgactggggggaccaggccaagattgagaaatctgggctcaacggtgtggaccggcaaacactggtgtcagacaatattgaatggcccaacggaatcaccctggatctgctgagccagcgcttgtactgggtagactccaagctacaccaactgtccagcattgacttcagtggaggcaacagaaagacgctgatctcctccactgacttcctgagccacccttttgggatagctgtgtttgaggacaaggtgttctggacagacctggagaacgaggccattttcagtgcaaatcggctcaatggcctggaaatctccatcctggctgagaacctcaacaacccacatgacattgtcatcttccatgagctgaagcagccaagagctccagatgcctgtgagctgagtgtccagcctaatggaggctgtgaatacctgtgccttcctgctcctcagatctccagccactctcccaagtacacatgtgcctgtcctgacacaatgtggctgggtccagacatgaagaggtgctaccgagcacctcaatctacctcaactacgacgttagcttctaccatgacgaggacagtacctgccaccacaagagcccccgggaccaccgtccacagatccacctaccagaaccacagcacagagacaccaagcctgacagctgcagtcccaagctcagttagtgtccccagggctcccagcatcagcccgtctaccctaagccctgcaaccagcaaccactcccagcactatgcaaatgaagacagtaagatgggctcaacagtcactgccgctgttatcgggatcatcgtgcccatagtggtgatagccctcctgtgcatgagtggatacctgatctggagaaactggaagcggaagaacaccaaaagcatgaattttgacaacccagtctacaggaaaacaacagaagaagaagatgaagatgagctccatatagggagaactgctcagattggccatgtctatcctgcagcaatcagcagctttgatcgcccactgtgggcagagccctgtcttggggagaccagagaaccggaagacccagcccctgccctcaaggagctttttgtcttgccgggggaaccaaggtcacagctgcaccaactcccgaagaaccctctttccgagctgcctgtcgtcaaatccaagcgagtggcattaagccttgaagatgatggactaccctgaggatgggatcacccccttcgtgcctcatggaattcagtcccatgcactacactctggatggtgtatgactggatgaatgggtttctatatatgggtctgtgtgagtgtatgtgtgtgtgtgattttttttttaaatttatgttgcggaaaggtaaccacaaagttatgatgaactgcaaacatccaaaggatgtgagagtttttctatgtataatgttttatacactttttaactggttgcactacccatgaggaattcgtggaatggctactgctgactaacatgatgcacataaccaaatgggggccaatggcacagtaccttactcatcatttaaaaactatatttacagaagatgtttggttgctgggggggcttttttgggttttggggcatttgttttttgtaaataagatgattatgctttgtggctatccatcaacataagtaaaaaaaaaaaaaaaacacttcaactccctcccccatttagattatttattaacatattttaaaaatcagatgagttctataaataatttagagaagtgagagtatttatttttggcatgtttggcccaccacacagactctgtgtgtgtatgtgtgtgtttatatgtgtatgtgtgtgacaggaaaatctgtagagaagaggcacatctatggctactgttcaaatacataaagataaatttattttcacacagtccacaaggggtatatcttgtagttttcagaaaagcctttggaaatctggatcaggaaatagataccatggtttgtgcaattatgtagtaaaaaaggcaaatcttttcacctctggctattcctgagaccccaggaagtcaggaaaagcctttcagctcacccatggctgctgtgactcctaccagggctttcttggctttggcgaaggtcagtgtacagacattccatggtaccagagtgctcagaaagtcaagataggatatgcctcaccctcagctactccttgttttaaagttcagctctttgagtaacttcttcaatttctttcaggacacttgggttgaattcagtaagtttcctctgaagcaccctgaagggtgccatccttacagagctaagtggagacgtttccagatcagcccaagtttactatagagactggcccaggcactgaatgtctaggacatgctgtggatgaagataaagatggtggaataggttttatcacatctcttatttctcttttccccttactctctaccatttcctttatgtggggaaacattttaaggtaataaataggttacttaccatcatatgttcatatagatgaaactaatttttggcttaagtcagaacaactggcccccaattgaagtcatatttgtggggggaaatggcatacgcaatattatattatattggatatttatgttcacacaggaatttggtttactgctttgtaaataaaagggaaaactccgggtatatgt

SEQ ID NO: 660 - protein, 963 aa, Homo sapiens
MGLPEPGPLRLLALLLLLLLLLLLRLQHLAAAAADPLLGGQGPAKECEKDQFQCRNERCIPSVWRCDEDDDCLDHSDEDDCPKKTCADSDFTCDNGHCIHERWKCDGEEECPDGSDESEATCTKQVCPAEKLSCGPTSHKCVPASWRCDGEKDCEGGADEAGCATLCAPHEFQCGNRSCLAAVFVCDGDDDCGDGSDERGCADPACGPREFRCGGDGGGACIPERWVCDRQFDCEDRSDEAAELCGRPGPGATSAPAACATVSQFACRSGECVHLGWRCDGDRDCKDKSDEADCPLGTCRGDEFQCGDGTCVLAIKHCNQEQDCPDGSDEAGCLQGLNECLHNNGGCSHICTDLKIGFECTCPAGFQLLDQKTCGDIDECKDPDACSQICVNYKGYFKCECYPGYEMDLLTKNCKAAGGKSPSLIFTNRYEVRRIDLVKRNYSRLIPMLKNVVALDVEVATNRIYWCDLSYRKIYSAYMDKASDPKEQEVLIDEQLHSPEGLAVDWVHKHIYWTDSGNKTISVATVDGGRRRTLFSRNLSEPRAIAVDPLRGFMYWSDWGDQAKIEKSGLNGVDRQTLVSDNIEWPNGITLDLLSQRLYWVDSKLHQLSSIDFSGGNRKTLISSTDFLSHPFGIAVFEDKVFWTDLENEAIFSANRLNGLEISILAENLNNPHDIVIFHELKQPRAPDACELSVQPNGGCEYLCLPAPQISSHSPKYTCACPDTMWLGPDMKRCYRAPQSTSTTTLASTMTRTVPATTRAPGTTVHRSTYQNHSTETPSLTAAVPSSVSVPRAPSISPSTLSPATSNHSQHYANEDSKMGSTVTAAVIGIIVPIVVIALLCMSGYLIWRNWKRKNTKSMNFDNPVYRKTTEEEDEDELHIGRTAQIGHVYPAAISSFDRPLWAEPCLGETREPEDPAPALKELFVLPGEPRSQLHQLPKNPLSELPVVKSKRVALSLEDDGLP

SEQ ID NO: 661 - DNA, 4294 bp, Homo sapiens
  CDS (103)..(2817)
gcagcggcaaccccggcgccgcggcaaggactcggagggctgagacgcggcggcggcggcgcggggagcgcggggcgcggcggccggagccccgggcccgccatgggcctccccgagccgggccctctccggcttctggcgctgctgctgctgctgctgctgctgctgctgctgcggctccagcatcttgcggcggcagcggctgatccgctgctcggcggccaagggccggccaaggagtgcgaaaaggaccaattccagtgccggaacgagcgctgcatcccctctgtgtggagatgcgacgaggacgatgactgcttagaccacagcgacgaggacgactgccccaagaagacctgtgcagacagtgacttcacctgtgacaacggccactgcatccacgaacggtggaagtgtgacggcgaggaggagtgtcctgatggctccgatgagtccgaggccacttgcacactgggcacctgccgtggggacgagttccagtgtggggatgggacatgtgtccttgcaatcaagcactgcaaccaggagcaggactgtccagatgggagtgatgaagctggctgcctacaggagtcaccctgtgagggtccccgcagatttcagtgtaagagtggcaagcgcgtggacggcgggaaagtgtgtgatgtgcagagggactgccgggactggtcggatgagcttctgaaagtgtggtgcggtgcctgtctacgcccactggctggactcagtctcctaccatccccctcctggtatctaggctcaaggccctccagtgccccctgccctgacactttctgctctgaccctctctttggattcatgtgccgtcctatggcttcacatggggcttttcgcccccaggcctctggtctacatctctacaaagtgctaagagcttgtccatcccagaggaggctgaacgagtgtctgcacaacaatggcggctgctcacacatctgcactgacctcaagattggctttgaatgcacgtgcccagcaggcttccagctcctggaccagaagacctgtggcgacattgatgagtgcaaggacccagatgcctgcagccagatctgtgtcaattacaagggctattttaagtgtgagtgctaccctggctacgagatggacctactgaccaagaactgccaagctgctgctggaaagagcccatccctaatcttcaccaaccggtacgaggtgcggaggatcgacctggtgaagcggaactattcacgcctcatccccatgctcaagaatgtcgtggcactagatgtggaagttgccaccaatcgcatctactggtgtgacctctcctaccgtaagatctatagcgcctacatggacaaggccagtgacccgaaagagcaggaggtcctcattgacgagcagttgcactctccagagggcctggcagtggactgggtccacaagcacatctactggactgactcgggcaataagaccatctcagtggccacagttgatggtggccgccgacgcactctcttcagccgtaacctcagtgaaccccgggccatcgctgttgaccccctgcgagggttcatgtattggtctgactggggggaccaggccaagattgagaaatctgggctcaacggtgtggaccggcaaacactggtgtcagacaatattgaatggcccaacggaatcaccctggatctgctgagccagcgcttgtactgggtagactccaagctacaccaactgtccagcattgacttcagtggaggcaacagaaagacgctgatctcctccactgacttcctgagccacccttttgggatagctgtgtttgaggacaaggtgttctggacagacctggagaacgaggccattttcagtgcaaatcggctcaatggcctggaaatctccatcctggctgagaacctcaacaacccacatgacattgtcatcttccatgagctgaagcagccaagagctccagatgcctgtgagctgagtgtccagcctaatggaggctgtgaatacctgtgccttcctgctcctcagatctccagccactctcccaagtacacatgtgcctgtcctgacacaatgtggctgggtccagacatgaagaggtgctaccgagcacctcaatctacctcaactacgacgttagcttctaccatgacgaggacagtacctgccaccacaagagcccccgggaccaccgtccacagatccacctaccagaaccacagcacagagacaccaagcctgacagctgcagtcccaagctcagttagtgtccccagggctcccagcatcagcccgtctaccctaagccctgcaaccagcaaccactcccagcactatgcaaatgaagacagtaagatgggctcaacagtcactgccgctgttatcgggatcatcgtgcccatagtggtgatagccctcctgtgcatgagtggatacctgatctggagaaactggaagcggaagaacaccaaaagcatgaattttgacaacccagtctacaggaaaacaacagaagaagaagacgaagatgagctccatatagggagaactgctcagattggccatgtctatcctgcagcaatcagcagctttgatcgcccactgtgggcagagccctgtcttggggagaccagagaaccggaagacccagcccctgccctcaaggagctttttgtcttgccgggggaaccaaggtcacagctgcaccaactcccgaagaaccctctttccgagctgcctgtcgtcaaatccaagcgagtggcattaagccttgaagatgatggactaccctgaggatgggatcacccccttcgtgcctcatggaattcagtcccatgcactacactctggatggtgtatgactggatgaatgggtttctatatatgggtctgtgtgagtgtatgtgtgtgtgtgattttttttttaaatttatgttgcggaaaggtaaccacaaagttatgatgaactgcaaacatccaaaggatgtgagagtttttctatgtataatgttttatacactttttaactggttgcactacccatgaggaattcgtggaatggctactgctgactaacatgatgcacataaccaaatgggggccaatggcacagtaccttactcatcatttaaaaactatatttacagaagatgtttggttgctgggggggcttttttgggttttggggcatttgttttttgtaaataagatgattatgctttgtggctatccatcaacataagtaaaaaaaaaaaaaaaacacttcaactccctcccccatttagattatttattaacatattttaaaaatcagatgagttctataaataatttagagaagtgagagtatttatttttggcatgtttggcccaccacacagactctgtgtgtgtatgtgtgtgtttatatgtgtatgtgtgtgacaggaaaatctgtagagaagaggcacatctatggctactgttcaaatacataaagataaatttattttcacacagtccacaaggggtatatcttgtagttttcagaaaagcctttggaaatctggatcaggaaatagataccatggtttgtgcaattatgtagtaaaaaaggcaaatcttttcacctctggctattcctgagaccccaggaagtcaggaaaagcctttcagctcacccatggctgctgtgactcctaccagggctttcttggctttggcgaaggtcagtgtacagacattccatggtaccagagtgctcagaaagtcaagataggatatgcctcaccctcagctactccttgttttaaagttcagctctttgagtaacttcttcaatttctttcaggacacttgggttgaattcagtaagtttcctctgaagcaccctgaagggtgccatccttacagagctaagtggagacgtttccagatcagcccaagtttactatagagactggcccaggcactgaatgtctaggacatgctgtggatgaagataaagatggtggaataggttttatcacatctcttatttctcttttccccttactctctaccatttcctttatgtggggaaacattttaaggtaataaataggttacttaccatcatatgttcatatagatgaaactaatttttggcttaagtcagaacaactggcccccaattgaagtcatatttgtggggggaaatggcatacgcaatattatattatattggatatttatgttcacacaggaatttggtttactgctttgtaaataaaagggaaaactccgggta

SEQ ID NO: 662 - protein, 905 aa, Homo sapiens; identical to SEQ ID NO: 638

SEQ ID NO: 663 - DNA, 4294 bp, Homo sapiens
  CDS (103)..(2817)
gcagcggcaaccccggcgccgcggcaaggactcggagggctgagacgcggcggcggcggcgcggggagcgcggggcgcggcggccggagccccgggcccgccatgggcctccccgagccgggccctctccggcttctggcgctgctgctgctgctgctgctgctgctgctgctgcggctccagcatcttgcggcggcagcggctgatccgctgctcggcggccaagggccggccaaggagtgcgaaaaggaccaattccagtgccggaacgagcgctgcatcccctctgtgtggagatgcgacgaggacgatgactgcttagaccacagcgacgaggacgactgccccaagaagacctgtgcagacagtgacttcacctgtgacaacggccactgcatccacgaacggtggaagtgtgacggcgaggaggagtgtcctgatggctccgatgagtccgaggccacttgcacactgggcacctgccgtggggacgagttccagtgtggggatgggacatgtgtccttgcaatcaagcactgcaaccaggagcaggactgtccagatgggagtgatgaagctggctgcctacaggagtcaccctgtgagggtccccgcagatttcagtgtaagagtggcaagcgcgtggacggcgggaaagtgtgtgatgtgcagagggactgccgggactggtcggatgagcttctgaaagtgtggtgcggtgcctgtctacgcccactggctggactcagtctcctaccatccccctcctggtatctaggctcaaggccctccagtgccccctgccctgacactttctgctctgaccctctctttggattcatgtgccgtcctatggcttcacatggggcttttcgcccccaggcctctggtctacatctctacaaagtgctaagagcttgtccatcccagaggaggctgaacgagtgtctgcacaacaatggcggctgctcacacatctgcactgacctcaagattggctttgaatgcacgtgcccagcaggcttccagctcctggaccagaagacctgtggcgacattgatgagtgcaaggacccagatgcctgcagccagatctgtgtcaattacaagggctattttaagtgtgagtgctaccctggctacgagatggacctactgaccaagaactgccaagctgctgctggaaagagcccatccctaatcttcaccaaccggtacgaggtgcggaggatcgacctggtgaagcggaactattcacgcctcatccccatgctcaagaatgtcgtggcactagatgtggaagttgccaccaatcgcatctactggtgtgacctctcctaccgtaagatctatagcgcctacatggacaaggccagtgacccgaaagagcaggaggtcctcattgacgagcagttgcactctccagagggcctggcagtggactgggtccacaagcacatctactggactgactcgggcaataagaccatctcagtggccacagttgatggtggccgccgacgcactctcttcagccgtaacctcagtgaaccccgggccatcgctgttgaccccctgcgagggttcatgtattggtctgactggggggaccaggccaagattgagaaatctgggctcaacggtgtggaccggcaaacactggtgtcagacaatattgaatggcccaacggaatcaccctggatctgctgagccagcgcttgtactgggtagactccaagctacaccaactgtccagcattgacttcagtggaggcaacagaaagacgctgatctcctccactgacttcctgagccacccttttgggatagctgtgtttgaggacaaggtgttctggacagacctggagaacgaggccattttcagtgcaaatcggctcaatggcctggaaatctccatcctggctgagaacctcaacaacccacatgacattgtcatcttccatgagctgaagcagccaagagctccagatgcctgtgagctgagtgtccagcctaatggaggctgtgaatacctgtgccttcctgctcctcagatctccagccactctcccaagtacacatgtgcctgtcctgacacaatgtggctgggtccagacatgaagaggtgctaccgagcacctcaatctacctcaactacgacgttagcttctaccatgacgaggacagtacctgccaccacaagagcccccgggaccaccgtccacagatccacctaccagaaccacagcacagagacaccaagcctgacagctgcagtcccaagctcagttagtgtccccagggctcccagcatcagcccgtctaccctaagccctgcaaccagcaaccactcccagcactatgcaaatgaagacagtaagatgggctcaacagtcactgccgctgttatcgggatcatcgtgcccatagtggtgatagccctcctgtgcatgagtggatacctgatctggagaaactggaagcggaagaacaccaaaagcatgaattttgacaacccagtctacaggaaaacaacagaagaagaagatgaagatgagctccatatagggagaactgctcagattggccatgtctatcctgcagcaatcagcagctttgatcgcccactgtgggcagagccctgtcttggggagaccagagaaccggaagacccagcccctgccctcaaggagctttttgtcttgccgggggaaccaaggtcacagctgcaccaactcccgaagaaccctctttccgagctgcctgtcgtcaaatccaagcaagtggcattaagccttgaagatgatggactaccctgaggatgggatcacccccttcgtgcctcatggaattcagtcccatgcactacactctggatggtgtatgactggatgaatgggtttctatatatgggtctgtgtgagtgtatgtgtgtgtgtgattttttttttaaatttatgttgcggaaaggtaaccacaaagttatgatgaactgcaaacatccaaaggatgtgagagtttttctatgtataatgttttatacactttttaactggttgcactacccatgaggaattcgtggaatggctactgctgactaacatgatgcacataaccaaatgggggccaatggcacagtaccttactcatcatttaaaaactatatttacagaagatgtttggttgctgggggggcttttttgggttttggggcatttgttttttgtaaataagatgattatgctttgtggctatccatcaacataagtaaaaaaaaaaaaaaaacacttcaactccctcccccatttagattatttattaacatattttaaaaatcagatgagttctataaataatttagagaagtgagagtatttatttttggcatgtttggcccaccacacagactctgtgtgtgtatgtgtgtgtttatatgtgtatgtgtgtgacaggaaaatctgtagagaagaggcacatctatggctactgttcaaatacataaagataaatttattttcacacagtccacaaggggtatatcttgtagttttcagaaaagcctttggaaatctggatcaggaaatagataccatggtttgtgcaattatgtagtaaaaaaggcaaatcttttcacctctggctattcctgagaccccaggaagtcaggaaaagcctttcagctcacccatggctgctgtgactcctaccagggctttcttggctttggcgaaggtcagtgtacagacattccatggtaccagagtgctcagaaagtcaagataggatatgcctcaccctcagctactccttgttttaaagttcagctctttgagtaacttcttcaatttctttcaggacacttgggttgaattcagtaagtttcctctgaagcaccctgaagggtgccatccttacagagctaagtggagacgtttccagatcagcccaagtttactatagagactggcccaggcactgaatgtctaggacatgctgtggatgaagataaagatggtggaataggttttatcacatctcttatttctcttttccccttactctctaccatttcctttatgtggggaaacattttaaggtaataaataggttacttaccatcatatgttcatatagatgaaactaatttttggcttaagtcagaacaactggcccccaattgaagtcatatttgtggggggaaatggcatacgcaatattatattatattggatatttatgttcacacaggaatttggtttactgctttgtaaataaaagggaaaactccgggta

SEQ ID NO: 664 - protein, 905 aa, Homo sapiens
MGLPEPGPLRLLALLLLLLLLLLLRLQHLAAAAADPLLGGQGPAKECEKDQFQCRNERCIPSVWRCDEDDDCLDHSDEDDCPKKTCADSDFTCDNGHCIHERWKCDGEEECPDGSDESEATCTLGTCRGDEFQCGDGTCVLAIKHCNQEQDCPDGSDEAGCLQESPCEGPRRFQCKSGKRVDGGKVCDVQRDCRDWSDELLKVWCGACLRPLAGLSLLPSPSWYLGSRPSSAPCPDTFCSDPLFGFMCRPMASHGAFRPQASGLHLYKVLRACPSQRRLNECLHNNGGCSHICTDLKIGFECTCPAGFQLLDQKTCGDIDECKDPDACSQICVNYKGYFKCECYPGYEMDLLTKNCQAAAGKSPSLIFTNRYEVRRIDLVKRNYSRLIPMLKNVVALDVEVATNRIYWCDLSYRKIYSAYMDKASDPKEQEVLIDEQLHSPEGLAVDWVHKHIYWTDSGNKTISVATVDGGRRRTLFSRNLSEPRAIAVDPLRGFMYWSDWGDQAKIEKSGLNGVDRQTLVSDNIEWPNGITLDLLSQRLYWVDSKLHQLSSIDFSGGNRKTLISSTDFLSHPFGIAVFEDKVFWTDLENEAIFSANRLNGLEISILAENLNNPHDIVIFHELKQPRAPDACELSVQPNGGCEYLCLPAPQISSHSPKYTCACPDTMWLGPDMKRCYRAPQSTSTTTLASTMTRTVPATTRAPGTTVHRSTYQNHSTETPSLTAAVPSSVSVPRAPSISPSTLSPATSNHSQHYANEDSKMGSTVTAAVIGIIVPIVVIALLCMSGYLIWRNWKRKNTKSMNFDNPVYRKTTEEEDEDELHIGRTAQIGHVYPAAISSFDRPLWAEPCLGETREPEDPAPALKELFVLPGEPRSQLHQLPKNPLSELPVVKSKQVALSLEDDGLP

SEQ ID NO: 665 - DNA, 7876 bp, Homo sapiens
  CDS (6)..(7856)
  misc_feature (746)..(746): Wherein n may be a, c, g or t
tcaggatgaaggtaaaaggcagaggaatcacctgcttgctggtctcctttgctgtgatctgcctggtcgccacccctgggggcaaggcctgtcctcgccgctgtgcctgttatatgcctacggaggtacactgcacatttcggtacctgacttccatcccagacagcatcccgcccaatgtggaacgcatcaatttagggtacaacagcttggttagattgatggaaacagatttttctggcctgaccaaactggagttactcatgcttcacagcaatggcattcacacaatccctgacaagaccttctcagatttgcaggccttgcaggtgagactgatggtcttaaaaatgagctataataaagtccgaaaacttcagaaagatactttttatggcctcaggagcttgacacgattgcacatggaccacaacaatattgagtttataaacccagaggttttttatgggctcaactttctccgcctggtgcacttggaaggaaatcagctcactaagctccacccagatacatttgtctctttgagctacctccagatatttaaaatctctttcattaagttcctatacttgtctgataacttcctgacctccctccctcaagagatggtctcctatatgcctgacctagacagcctttacctgcatggaaacccatggacctgtgattgccatttaaagtggttgtctgactggatacaggagaagccaggtatctatattgtnttaccagatgtaataaaatgcaaaaaagatagaagtccctctagtgctcagcagtgtccactttgcatgaaccctaggacttctaaaggcaagccgttagctatggtctcagctgcagctttccagtgtgccaagccaaccattgactcatccctgaaatcaaagagcctgactattctggaagacagtagttctgctttcatctctccccaaggtttcatggcaccctttggctccctcactttgaatatgacagatcagtctggaaatgaagctaacatggtctgcagtattcaaaagccctcaaggacatcacccattgcattcactgaagaaaatgactacatcgtgctaaatacttcattttcaacatttttggtgtgcaacatagattacggtcacattcagccagtgtggcaaattttggctttgtacagtgattctcctctgatactagaaaggagccacttgcttagtgaaacaccgcagctctattacaaatataaacaggtggctcctaagcctgaagacatttttaccaacatagaggcagatctcagagcagatccctcttggttaatgcaagaccaaatttccttgcagctgaacagaactgccaccacattcagtacattacagatccagtactccagtgatgctcaaatcactttaccaagagcagagatgaggccagtgaaacacaaatggactatgatttcaagggataacaatactaagctggaacatactgtcttggtaggtggaaccgttggcctgaactgcccaggccaaggagaccccaccccacacgtggattggcttctagctgatggaagtaaagtgagagccccttatgtcagtgaggatggacggatcctaatagacaaaagtggaaaattggaactccagatggctgatagttttgacacaggcgtatatcactgtataagcagcaattatgatgatgcagatattctcacctataggataactgtggtagaacctttggtcgaagcctatcaggaaaatgggattcatcacacagttttcattggtgaaacacttgatcttccatgccattctactggtatcccagatgcctctattagctgggttattccaggaaacaatgtgctctatcagtcatcaagagacaagaaagttctaaacaatggcacattaagaatattacaggtcaccccgaaagaccaaggttattatcgctgtgtggcagccaacccatcaggggttgattttttgattttccaagtttcagtcaagatgaaaggacaaaggcccttggagcatgatggagaaacagagggatctggacttgatgagtccaatcctattgctcatcttaaggagccaccaggtgcacaactccgtacatctgctctgatggaggctgaggttggaaaacacacctcaagcacaagtaagaggcacaactatcgggaattaacactccagcgacgtggagattcaacacatcgacgttttagggagaataggaggcatttccctccctctgctaggagaattgacccacaacattgggcggcactgttggagaaagctaaaaagaatgctatgccagacaagcgagaaaataccacagtgagcccacccccagtggtcacccaactcccaaacatacctggtgaagaagacgattcctcaggcatgctcgctctacatgaggaatttatggtcccggccactaaagctttgaaccttccagcaaggacagtgactgctgactccagaacaatatctgatagtcctatgacaaacataaattatggcacagaattctctcctgttgtgaattcacaaatactaccacctgaagaacccacagatttcaaactgtctactgctattaaaactacagccatgtcaaagaatataaacccaaccatgtcaagccaaatacaaggcacaaccaatcaacattcatccactgtctttccactgctacttggagcaactgaatttcaggactctgaccagatgggaagaggaagagagcatttccaaagtagacccccaataacagtaaggactatgatcaaagatgtcaatgtcaaaatgcttagtagcaccaccaacaaactattattagagtcagtaaataccacaaatagtcatcagacatctgtaagagaagtgagtgaacccaggcacaatcacttctattctcacactactcaaatacttagcacctccacgttcccttcagatccacacacagctgctcattctcagtttccgatccctagaaatagtacagttaacatcccgctgttcagacgctttgggaggcagaggaaaattggcggaagggggcggattatcagcccatatagaactccagttctgcgacggcatagatacagcattttcaggtcaacaaccagaggttcttctgaaaaaagcactactgcattctcagccacagtgctcaatgtgacatgtctgtcctgtcttcccagggagaggctcaccactgccacagcagcattgtcttttccaagtgctgctcccatcaccttccccaaagctgacattgctagagtcccatcagaagagtctacaactctagtccagaatccactattactacttgagaacaaacccagtgtagagaaaacaacacccacaataaaatatttcaggactgaaatttcccaagtgactccaactggtgcagtcatgacatatgctccaacatccatacccatggaaaaaactcacaaagtaaacgccagttacccacgtgtgtctagcaccaatgaagctaaaagagattcagtgattacatcgtcactttcaggtgctatcaccaagccaccaatgactattatagccattacaaggttttcaagaaggaaaattccctggcaacagaactttgtaaataaccataacccaaaaggcagattaaggaatcaacataaagttagtttacaaaaaagcacagctgtgatgcttcctaaaacatctcctgctttaccacagagacaaagtctcccctcgcaccacactacgaccaaaacacacaatcctggaagtcttccaacaaagaaggagcttcccttcccaccccttaaccctatgcttcctagtattataagcaaagactcaagtacaaaaagcatcatatcaacgcaaacagcaataccagcaacaactcctaccttccctgcatctgtcatcacttatgaaacccaaacagagagatctagagcacaaacaatacaaagagaacaggagcctcaaaagaagaacaggactgacccaaacatctctccagaccagagttctggcttcactacacccactgctatgacacctcctgttctaaccacagccgaaacttcagtcaagcccagtgtctctgcattcactcattccccaccagaaaacacaactgggatttcaagcacaatcagttttcattcaagaactcttaatctgacagatgtgattgaagaactagcccaagcaagtactcagactttgaagagcacaattgcttctgaaacaactttgtccagcaaatcacaccagagtaccacaactaggaaagcaatcattagacactcaaccataccaccattcttgagcagcagtgctactctaatgccagttcccatctcccctccctttactcagagagcagttactgacaacgtggcgactcccatttccgggcttatgacaaatacagtggtcaagctgcacgaatcctcaaggcacaatgctaaaccacagcaattagtagcagaggttgcaacatcccccaaggttcacccaaatgccaagttcacaattggaaccactcacttcatctactctaatctgttacattctactcccatgccagcactaacaacagttaaatcacagaattctaaattaactccatctccctgggcagaaaaccaattttggcacaaaccatactcagaaattgctgaaaaaggcaaaaagccagaagtaagcatgttggctactacaggcctgtccgaggccaccactcttgtttcagattgggatggacagaagaacacaaagaagagtgactttgataagaaaccagttcaagaagcaacaacttccaaactccttccctttgactctttgtctaggtatatatttgaaaagcccaggatagttggaggaaaagctgcaagttttactattccagctaactcagatgcctttcttccctgtgaagctgttggaaatcccctgcccaccattcattggaccagagtcccatcaggtatgtcaggacttgatttatctaagaggaaacagaatagcagggtccaggttctccccaatggtaccctgtccatccagagggtggaaattcaggaccgcggacagtacttgtgttccgcatccaatctgtttggcacagaccaccttcatgtcaccttgtctgtggtttcctatcctcccaggatcctggagagacgtaccaaagagatcacagttcattccggaagcactgtggaactgaagtgcagagcagaaggtaggccaagccctacagttacctggattcttgcaaaccaaacagttgtctcagaatcatcccagggaagtaggcaggctgtggtgacggttgacggaacattggtcctccacaatctcagtatttatgaccgtggcttttacaaatgtgtggccagcaacccaggtggccaggattcactgctggttaaaatacaagtcattgcagcaccacctgttattctagagcaaaggaggcaagtcattgtaggcacttggggtgaaagtttaaaactgccctgtactgcaaaaggaactcctcagcccagcgtttactgggtcctctctgatggcactgaagtgaaaccattacagtttaccaattccaagttgttcttattttcaaatgggactttgtatataagaaacctagcctcttcagacaggggcacttatgaatgcattgctaccagttccactggttcggagcgaagagtagtaatgcttacaatggaagagcgagtgaccagccccaggatagaagctgcatcccagaaaaggactgaagtgaattttggggacaaattactactgaactgctcagccactggggagcccaaaccccaaataatgtggaggttaccatccaaggctgtggtcgaccagcagcatagggtgggcagctggatccacgtctaccctaatggatccctgtttattggatcagtaacagaaaaagacagtggtgtctacttgtgtgtggcaagaaacaaaatgggggatgatctgatactgatgcatgttagcctaagactgaaacctgccaaaattgaccacaagcagtattttagaaagcaagtgctccatgggaaagatttccaagtagattgcaaagcttccggctccccagtgccagagatatcttggagtttgcctgatggaaccatgatcaacaatgcaatgcaagccgatgacagtggccacaggactaggagatatacccttttcaacaatggaactttatacttcaacaaagttggggtagcggaggaaggagattatacttgctatgcccagaacaccctagggaaagatgaaatgaaggtccacttaacagttataacagctgctccccggataaggcagagtaacaaaaccaacaagagaatcaaagctggagacacagctgtccttgactgtgaggtcactggggatcccaaaccaaaaatattttggttgctgccttccaatgacatgatttccttctccattgataggtacacatttcatgccaatgggtctttgaccatcaacaaagtgaaactgctcgattctggagagtacgtatgtgtagcccgaaatcccagtggggatgacaccaaaatgtacaaactggatgtggtctctaaacctccattaatcaatggtctgtatacaaacagaactgttattaaagccacagctgtgagacattccaaaaaacactttgactgcagagctgaagggacaccatctcctgaagtcatgtggatcatgccagacaatattttcctcacagccccatactatggaagcagaatcacagtccataaaaatggaaccttggaaattaggaatgtgaggctttcagattcagccgactttatctgtgtggcccgaaatgaaggtggagagagcgtgttggtagtacagttagaagtactggaaatgctgagaagaccgacatttagaaatccatttaatgaaaaaatagttgcccagctgggaaagtccacagcattgaattgctctgttgatggtaacccaccacctgaaataatctggattttaccaaatggcacacgattttccaatggaccacaaagttatcagtatctgatagcaagcaatggttcttttatcatttctaaaacaactcgggaggatgcaggaaaatatcgctgtgcagctaggaataaagttggctatattgagaaattagtcatattagaaattggccagaagccagttattcttacctatgcaccagggacagtaaaaggcatcagtggagaatctctatcactgcattgtgtgtctgatggaatccctaagccaaatatcaaatggactatgccaagtggttatgtagtagacaggcctcaaattaatgggaaatacatattgcatgacaatggcaccttagtcattaaagaagcaacagcttatgacagaggaaactatatctgtaaggctcaaaatagtgttggtcatacactgattactgttccagtaatgattgtagcctaccctccccgaattacaaatcgtccacccaggagtattgtcaccaggacaggggcagcctttcagctccactgtgtggccttgggagttcccaagccagaaatcacatgggagatgcctgaccactcccttctctcaacggcaagtaaagagaggacacatggaagtgagcagcttcacttacaaggtaccctagtcattcagaatccccaaacctccgattctgggatatacaaatgcacagcaaagaacccacttggtagtgattatgcagcaacgtatattcaagtaatctgacatgaaataataaagtc

SEQ ID NO: 666 - protein, 2617 aa, Homo sapiens
MKVKGRGITCLLVSFAVICLVATPGGKACPRRCACYMPTEVHCTFRYLTSIPDSIPPNVERINLGYNSLVRLMETDFSGLTKLELLMLHSNGIHTIPDKTFSDLQALQVRLMVLKMSYNKVRKLQKDTFYGLRSLTRLHMDHNNIEFINPEVFYGLNFLRLVHLEGNQLTKLHPDTFVSLSYLQIFKISFIKFLYLSDNFLTSLPQEMVSYMPDLDSLYLHGNPWTCDCHLKWLSDWIQEKPGIYIVLPDVIKCKKDRSPSSAQQCPLCMNPRTSKGKPLAMVSAAAFQCAKPTIDSSLKSKSLTILEDSSSAFISPQGFMAPFGSLTLNMTDQSGNEANMVCSIQKPSRTSPIAFTEENDYIVLNTSFSTFLVCNIDYGHIQPVWQILALYSDSPLILERSHLLSETPQLYYKYKQVAPKPEDIFTNIEADLRADPSWLMQDQISLQLNRTATTFSTLQIQYSSDAQITLPRAEMRPVKHKWTMISRDNNTKLEHTVLVGGTVGLNCPGQGDPTPHVDWLLADGSKVRAPYVSEDGRILIDKSGKLELQMADSFDTGVYHCISSNYDDADILTYRITVVEPLVEAYQENGIHHTVFIGETLDLPCHSTGIPDASISWVIPGNNVLYQSSRDKKVLNNGTLRILQVTPKDQGYYRCVAANPSGVDFLIFQVSVKMKGQRPLEHDGETEGSGLDESNPIAHLKEPPGAQLRTSALMEAEVGKHTSSTSKRHNYRELTLQRRGDSTHRRFRENRRHFPPSARRIDPQHWAALLEKAKKNAMPDKRENTTVSPPPVVTQLPNIPGEEDDSSGMLALHEEFMVPATKALNLPARTVTADSRTISDSPMTNINYGTEFSPVVNSQILPPEEPTDFKLSTAIKTTAMSKNINPTMSSQIQGTTNQHSSTVFPLLLGATEFQDSDQMGRGREHFQSRPPITVRTMIKDVNVKMLSSTTNKLLLESVNTTNSHQTSVREVSEPRHNHFYSHTTQILSTSTFPSDPHTAAHSQFPIPRNSTVNIPLFRRFGRQRKIGGRGRIISPYRTPVLRRHRYSIFRSTTRGSSEKSTTAFSATVLNVTCLSCLPRERLTTATAALSFPSAAPITFPKADIARVPSEESTTLVQNPLLLLENKPSVEKTTPTIKYFRTEISQVTPTGAVMTYAPTSIPMEKTHKVNASYPRVSSTNEAKRDSVITSSLSGAITKPPMTIIAITRFSRRKIPWQQNFVNNHNPKGRLRNQHKVSLQKSTAVMLPKTSPALPQRQSLPSHHTTTKTHNPGSLPTKKELPFPPLNPMLPSIISKDSSTKSIISTQTAIPATTPTFPASVITYETQTERSRAQTIQREQEPQKKNRTDPNISPDQSSGFTTPTAMTPPVLTTAETSVKPSVSAFTHSPPENTTGISSTISFHSRTLNLTDVIEELAQASTQTLKSTIASETTLSSKSHQSTTTRKAIIRHSTIPPFLSSSATLMPVPISPPFTQRAVTDNVATPISGLMTNTVVKLHESSRHNAKPQQLVAEVATSPKVHPNAKFTIGTTHFIYSNLLHSTPMPALTTVKSQNSKLTPSPWAENQFWHKPYSEIAEKGKKPEVSMLATTGLSEATTLVSDWDGQKNTKKSDFDKKPVQEATTSKLLPFDSLSRYIFEKPRIVGGKAASFTIPANSDAFLPCEAVGNPLPTIHWTRVPSGMSGLDLSKRKQNSRVQVLPNGTLSIQRVEIQDRGQYLCSASNLFGTDHLHVTLSVVSYPPRILERRTKEITVHSGSTVELKCRAEGRPSPTVTWILANQTVVSESSQGSRQAVVTVDGTLVLHNLSIYDRGFYKCVASNPGGQDSLLVKIQVIAAPPVILEQRRQVIVGTWGESLKLPCTAKGTPQPSVYWVLSDGTEVKPLQFTNSKLFLFSNGTLYIRNLASSDRGTYECIATSSTGSERRVVMLTMEERVTSPRIEAASQKRTEVNFGDKLLLNCSATGEPKPQIMWRLPSKAVVDQQHRVGSWIHVYPNGSLFIGSVTEKDSGVYLCVARNKMGDDLILMHVSLRLKPAKIDHKQYFRKQVLHGKDFQVDCKASGSPVPEISWSLPDGTMINNAMQADDSGHRTRRYTLFNNGTLYFNKVGVAEEGDYTCYAQNTLGKDEMKVHLTVITAAPRIRQSNKTNKRIKAGDTAVLDCEVTGDPKPKIFWLLPSNDMISFSIDRYTFHANGSLTINKVKLLDSGEYVCVARNPSGDDTKMYKLDVVSKPPLINGLYTNRTVIKATAVRHSKKHFDCRAEGTPSPEVMWIMPDNIFLTAPYYGSRITVHKNGTLEIRNVRLSDSADFICVARNEGGESVLVVQLEVLEMLRRPTFRNPFNEKIVAQLGKSTALNCSVDGNPPPEIIWILPNGTRFSNGPQSYQYLIASNGSFIISKTTREDAGKYRCAARNKVGYIEKLVILEIGQKPVILTYAPGTVKGISGESLSLHCVSDGIPKPNIKWTMPSGYVVDRPQINGKYILHDNGTLVIKEATAYDRGNYICKAQNSVGHTLITVPVMIVAYPPRITNRPPRSIVTRTGAAFQLHCVALGVPKPEITWEMPDHSLLSTASKERTHGSEQLHLQGTLVIQNPQTSDSGIYKCTAKNPLGSDYAATYIQVI

SEQ ID NO: 667 - DNA, 475 bp, Homo sapiens
  CDS (2)..(475)
caccctcgagaatgtggaacgcatcaatttagggtacaacagcttggttagattgatggaaacagatttttctggcctgaccaaactggagttactcatgcttcacagcaatggcattcacacaatccctgacaagaccttctcagatttgcaggccttgcaggtcttaaaaatgagctataacaaagtccgaaaacttcagaaagatactttttatggcctcaggagcttgacacgattgcacatggaccacaacaatattgagtttataaacccagaggtttttgatgggctcaactttctccgcctggtgcacttggaaggaaatcagctcactaagctccacccagatacatttgtctctttgagctacctccagatatttaaaatctctttcattaagttcctatacttgtctgataacttcctgacctccctccctcaagagatggtctcctatatgcctctcgagggc

SEQ ID NO: 668 - protein, 158 aa, Homo sapiens
TLENVERINLGYNSLVRLMETDFSGLTKLELLMLHSNGIHTIPDKTFSDLQALQVLKMSYNKVRKLQKDTFYGLRSLTRLHMDHNNIEFINPEVFDGLNFLRLVHLEGNQLTKLHPDTFVSLSYLQIFKISFIKFLYLSDNFLTSLPQEMVSYMPLEG

SEQ ID NO: 669 - DNA, 2011 bp, Homo sapiens
  CDS (2)..(2011)
aggctccgcggccgcccccttcaccctcgagggggacaaattactactgaactgctcagccactggggagcccaaaccccaaataatgtggaggttaccatccaaggctgtggtcgaccagcagcatagagtgggcagctggatccacgtctaccctaatggatccctgtttattggatcagtaacagaaaaagacagtggtgtctacttgtgtgtggcaagaaacaaaatgggggatgatctgatactgatgcatgttagcctaagactgaaacctgccaaaattgaccacaagcagtattttagaaagcaagtgctccatgggaaagatttccaagtagattgcaaagcttccggctccccagtgccagagatatcttggagtttgcctgatggaaccatgatcaacaatgcaatgcaagccgatgacagtggccacaggactaggagatatacccttttcaacaatggaactttatacttcaacaaagttggggtagcggaggaaggagattatacttgctatgcccagaacaccctagggaaagatgaaatgaaggtccacttaacagttataacagctgctccccggataaggcagagtaacaaaaccaacaagagaatcaaagctggagacacagctgtccttgactgtgaggtcactggggatcccaaaccaaaaatattttggttgctgccttccaatgacatgatttccttctccattgataggtacacatttcatgccaatgggtctttgaccatcaacaaagtgaaactgctcgattctggagagtacgtatgtgtagcccgaaatcccagtggggatgacaccaaaatgtacaaactggatgtggtctctaaacctccattaatcaatggtctgtatacaaacagaactgttattaaagccacagctgtgagacattccaaaaaacactttgactgcagagctgaagggacaccatctcctgaagtcatgtggatcatgccagacaatattttcctcacagccccatactatggaagcagaatcacagtccataaaaatggaaccttggaaattaggaatgtgaggctttcagattcagccgactttatctgtgtggcccgaaatgaaggtggagagagcgtgttggtagtacagttagaagtactggaaatgctgagaagaccgacatttagaaatccatttaatgaaaaaatagttgcccagctgggaaagtccacagcattgaattgctctgttgatggtaacccaccacctgaaataatctggattttaccaaatggcacacgattttccaatggaccacaaagttatcagtatctgatagcaagcaatggttcttttatcatttctaaaacaactcgggaggatgcaggaaaatatcgctgtgcagctaggaataaagttggctatattgagaaattagtcatattagaaattggccagaagccagttattcttacctatgcaccagggacagtaaaaggcatcagtggagaatctctatcactgcattgtgtgtctgatggaatccctaagccaaatatcaaatggactatgccaagtggttatgtagtagacaggcctcaaattaatgggaaatacatattgcatgacaatggcaccttagtcattaaagaagcaacagcttatgacagaggaaactatatctgtaaggctcaaaatagtgttggtcatacactgattactgttccagtaatgattgtagcctaccctccccgaattacaaatcgtccacccaggagtattgtcaccaggacaggggcagcctttcagctccactgtgtggccttgggagttcccaagccagaaatcacatgggagatgcctgaccactcccttctctcaacggcaagtaaagagaggacacatggaagtgagcagcttcacttacaaggtaccctagtcattcagaatccccaaacctccgattctgggatatacaaatgcacagcactcgagggcaagggtgggcgcgcc

SEQ ID NO: 670 - protein, 670 aa, Homo sapiens
GSAAAPFTLEGDKLLLNCSATGEPKPQIMWRLPSKAVVDQQHRVGSWIHVYPNGSLFIGSVTEKDSGVYLCVARNKMGDDLILMHVSLRLKPAKIDHKQYFRKQVLHGKDFQVDCKASGSPVPEISWSLPDGTMINNAMQADDSGHRTRRYTLFNNGTLYFNKVGVAEEGDYTCYAQNTLGKDEMKVHLTVITAAPRIRQSNKTNKRIKAGDTAVLDCEVTGDPKPKIFWLLPSNDMISFSIDRYTFHANGSLTINKVKLLDSGEYVCVARNPSGDDTKMYKLDVVSKPPLINGLYTNRTVIKATAVRHSKKHFDCRAEGTPSPEVMWIMPDNIFLTAPYYGSRITVHKNGTLEIRNVRLSDSADFICVARNEGGESVLVVQLEVLEMLRRPTFRNPFNEKIVAQLGKSTALNCSVDGNPPPEIIWILPNGTRFSNGPQSYQYLIASNGSFIISKTTREDAGKYRCAARNKVGYIEKLVILEIGQKPVILTYAPGTVKGISGESLSLHCVSDGIPKPNIKWTMPSGYVVDRPQINGKYILHDNGTLVIKEATAYDRGNYICKAQNSVGHTLITVPVMIVAYPPRITNRPPRSIVTRTGAAFQLHCVALGVPKPEITWEMPDHSLLSTASKERTHGSEQLHLQGTLVIQNPQTSDSGIYKCTALEGKGGRA

SEQ ID NO: 671 - DNA, 771 bp, Homo sapiens
  CDS (1)..(771)
aagcttgcctgtcctcgccgctgtgcctgttatatgcctacggaggtacactgcacatttcggtacctgacttccatcccagacagcatcccgcccaatgtggaacgcatcaatttaggatacaacagcttggttagattgatggaaacagatttttctggcctgaccaaactggagttactcatgcttcacagcaatggcattcacacaatccctgacaagaccttctcagatttgcaggccttgcaggtcttaaaaatgagctataataaagtccgaaaacttcagaaagatactttttatggcctcaggagcttgacacgattgcacatggaccacaacaatattgagtttataaacccagaggttttttatgggctcaactttctccgcctggtgcacttggaaggaaatcagctcactaagctccacccagatacatttgtctctttgagctacctccagatatttaaaatctctttcattaagttcctatacttgtctgataacttcctgacctccctccctcaagagatggtctcctatatgcctgacctagacagcctttacctgcatggaaacccatggacctgtgattgccatttaaagtggttgtctgactggatacaggagaagccagatgtaataaaatgcaaaaaagatagaagtccctctagtgctcagcagtgtccactttgcatgaaccctaggacttctaaaggcaagccgttagctatggtctcagctgcagctttccagtgtgccctcgag

SEQ ID NO: 672 - protein, 257 aa, Homo sapiens
KLACPRRCACYMPTEVHCTFRYLTSIPDSIPPNVERINLGYNSLVRLMETDFSGLTKLELLMLHSNGIHTIPDKTFSDLQALQVLKMSYNKVRKLQKDTFYGLRSLTRLHMDHNNIEFINPEVFYGLNFLRLVHLEGNQLTKLHPDTFVSLSYLQIFKISFIKFLYLSDNFLTSLPQEMVSYMPDLDSLYLHGNPWTCDCHLKWLSDWIQEKPDVIKCKKDRSPSSAQQCPLCMNPRTSKGKPLAMVSAAAFQCALE

SEQ ID NO: 673 - DNA, 771 bp, Homo sapiens
  CDS (1)..(771)
aagcttgcctgtcctcgccgctgtgcctgttatatgcctacggaggtacactgcacatttcggtacctgacttccatcccagacagcatcccgcccaatgtggaacgcatcaatttaggatacaacagcttggttagattgatggaaacagatttttctggcctgaccaaactggagttactcatgcttcacagcaatggcattcacacaatccctgacaagaccttctcagatttgcaggccttgcaggtcttaaaaatgagctataacaaagtccgaaaacttcagaaagatactttttatggcctcaggagcttgacacgattgcacatggaccacaacaatattgagtttataaacccagaggttttttatgggctcaactttctccgcctggtgcacttggaaggaaatcagctcactaagctccacccagatacatttgtctctttgagctacctccagatatttaaaatctctttcattaagttcctatacttgtctgataacttcctgacctccctccctcaagagatggtctcctatatgcctgacctagacagcctttacctgcatggaaacccatggacctgtgattgccatttaaagtggttgtctgactggatacaggagaagccagatgtaataaaatgcaaaaaagatagaagtccctctagtgctcagcagtgtccactttgcatgaaccctaggacttctaaaggcaagccgttagctatggtctcagctgcagctttccagtgtgccctcgag

SEQ ID NO: 674 - protein, 257 aa, Homo sapiens; identical to SEQ ID NO: 672

SEQ ID NO: 675 - DNA, 771 bp, Homo sapiens
  CDS (1)..(771)
aagcttgcctgtcctcgccgctgtgcctgttatatgcctacggaggtacactgcacatttcggtacctgacttccatcccagacagcatcccgcccaatgtggaacgcatcaatttaggatacaacagcttggttagattgatggaaacagatttttctggcctgaccaaactggagttactcatgcttcacagcaatggcattcacacaatccctgacaagaccttctcagatttgcaggccttgcaggtcttaaaaatgagctataacaaagtccgaaaacttcagaaagatactttttatggcctcaggagcttgacacgattgcacatggaccacaacaatattgagtttataaacccagaggtttttgatgggctcaactttctccgcctggtgcacttggaaggaaatcagctcactaagctccacccagatacatttgtctctttgagctacctccagatatttaaaatctctttcattaagttcctatacttgtctgataacttcctgacctccctccctcaagagatggtctcctatatgcctgacctagacagcctttacctgcatggaaacccatggacctgtgattgccatttaaagtggttgtctgactggatacaggagaagccagatgtaataaaatgcaaaaaagatagaagtccctctagtgctccgcagtgtccactttgcatgaaccctaggacttctaaaggcaagccgttagctatggtctcagctgcagctttccagtgtgccctcgag

SEQ ID NO: 676 - protein, 257 aa, Homo sapiens
KLACPRRCACYMPTEVHCTFRYLTSIPDSIPPNVERINLGYNSLVRLMETDFSGLTKLELLMLHSNGIHTIPDKTFSDLQALQVLKMSYNKVRKLQKDTFYGLRSLTRLHMDHNNIEFINPEVFDGLNFLRLVHLEGNQLTKLHPDTFVSLSYLQIFKISFIKFLYLSDNFLTSLPQEMVSYMPDLDSLYLHGNPWTCDCHLKWLSDWIQEKPDVIKCKKDRSPSSAPQCPLCMNPRTSKGKPLAMVSAAAFQCALE

SEQ ID NO: 677 - DNA, 771 bp, Homo sapiens
  CDS (1)..(771)
aagcttgcctgtcctcgccgctgtgcctgttatatgcctacggaggtacactgcacatttcggtacctgacttccatcccagacagcatcccgcccaatgtggaacgcatcaatttaggatacaacagcttggttagattgatggaaacagatttttctggcctgaccaaactggagttactcatgcttcacagcaatggcattcacacaatccctgacaagaccttctcagatttgcaggccttgcaggtcttaaaaatgagctataacaaagtccgaaaacttcagaaagatactttttatggcctcaggagcttgacacgattgcacatggaccacaacaatattgagtttataaacccagaggtttttgatgggctcaactttctccgcctggtgcacttggaaggaaatcagctcactaagctccacccagatacatttgtctctttgagctacctccagatatttaaaatctctttcattaagttcctatacttgtctgataacttcctgacctccctccctcaagagatggtctcctatatgcctgacctagacagcctttacctgcatggaaacccatggacctgtgattgccatttaaagtggttgtttgactggatacaggagaagccagatgtaataaaatgcaaaaaagatagaagtccctctagtgctcagcagtgtccactttgcatgaaccctaggacttctaaaggcaagccgttagctatggtctcagctgcagctttccagtgtgccctcgag

SEQ ID NO: 678 - protein, 257 aa, Homo sapiens
KLACPRRCACYMPTEVHCTFRYLTSIPDSIPPNVERINLGYNSLVRLMETDFSGLTKLELLMLHSNGIHTIPDKTFSDLQALQVLKMSYNKVRKLQKDTFYGLRSLTRLHMDHNNIEFINPEVFDGLNFLRLVHLEGNQLTKLHPDTFVSLSYLQIFKISFIKFLYLSDNFLTSLPQEMVSYMPDLDSLYLHGNPWTCDCHLKWLFDWIQEKPDVIKCKKDRSPSSAQQCPLCMNPRTSKGKPLAMVSAAAFQCALE

SEQ ID NO: 679 - DNA, 2059 bp, Homo sapiens
  CDS (2)..(2059)
aggctccgcggccgcccccttcaccctcgagggggacaaattactactgaactgctcagccactggggagcccaaaccccaaataatgtggaggttaccatccaaggctgtggtcgaccagcagcatagagtgggcagctggatccacgtctaccctaatggatccctgtttattggatcagtaacagaaaaagacagtggtgtctacttgtgtgtggcaagaaacaaaatgggggatgatctgatactgatgcatgttagcctaagactgaaacctgccaaaattgaccacaagcagtattttagaaagcaagtgctccatgggaaagatttccaagtagattgcaaagcttccggctccccagtgccagagatatcttggagtttgcctgatggaaccatgatcaacaatgcaatgcaagccgatgacagtggccacaggactaggagatatacccttttcaacaatggaactttatacttcaacaaagttggggtagcggaggaaggagattatacttgctatgcccagaacaccctagggaaagatgaaatgaaggtccacttaacagttataacagctgctccccggataaggcagagtaacaaaaccaacaagagaatcaaagctggagacacagctgtccttgactgtgaggtcactggggatcccaaaccaaaaatattttggttgctgccttccaatgacatgatttccttctccattgataggtacacatttcatgccaatgggtctttgaccatcaacaaagtgaaactgctcgattctggagagtacgtatgtgtagcccgaaatcccagtggggatgacaccaaaatgtacaaactggatgtggtctctaaacctccattaatcaatggtctgtatacaaatagaactgttattaaagccacagctgtgagacattccaaaaaacactttgactgcagagctgaagggacaccatctcctgaagtcatgtggatcatgccagacaatattttcctcacagccccatactatggaagcagaatcacagtccataaaaatggaaccttggaaattaggaatgtgaggctttcagattcagccgactttatctgtgtggcccgaaatgaaggtggagagagcgtgttggtagtacagttagaagtactggaaatgctgagaagaccgacatttagaaatccatttaatgaaaaaatagttgcccagctgggaaagtccacagcattgaattgctctgttgatggtaacccaccacctgaaataatctggattttaccaaatggcacacgattttccaatggaccacaaagttatcagtatctgatagcaagcaatggttcttttatcatttctaaaacaactcgggaggatgcaggaaaatatcgctgtgcagctaggaataaagttggctatattgagaaattagtcatattagaaattggccagaagccagttattcttacctatgcaccagggacagtaaaaggcatcagtggagaatctctatcactgcattgtgtgtctgatggaatccctaagccaaatatcaaatggactatgccaagtggttatgtagtagacaggcctcaaattaatgggaaatacatattgcatgacaatggcaccttagtcattaaagaagcaacagcttatgacagaggaaactatatctgtaaggctcaaaatagtgttggtcatacactgattactgttccagtaatgattgtagcctaccctccccgaattacaaatcgtccacccaggagtattgtcaccaggacaggggcagcctttcagctccactgtgtggccttgggagttcccaagccagaaatcacgtgggagatgcctgaccactcccttctctcaacggcaagtaaagagaggacacatggaagtgagcagcttcacttacaaggtaccctagtcattcagaatccccaaacctccgattctgggatatacaaatgcacagcaaagaacccacttggtagtgattatgcagcaacgtatattcaagtaatcctcgagggcaagggtgggcgcgcc

SEQ ID NO: 680 - protein, 686 aa, Homo sapiens
GSAAAPFTLEGDKLLLNCSATGEPKPQIMWRLPSKAVVDQQHRVGSWIHVYPNGSLFIGSVTEKDSGVYLCVARNKMGDDLILMHVSLRLKPAKIDHKQYFRKQVLHGKDFQVDCKASGSPVPEISWSLPDGTMINNAMQADDSGHRTRRYTLFNNGTLYFNKVGVAEEGDYTCYAQNTLGKDEMKVHLTVITAAPRIRQSNKTNKRIKAGDTAVLDCEVTGDPKPKIFWLLPSNDMISFSIDRYTFHANGSLTINKVKLLDSGEYVCVARNPSGDDTKMYKLDVVSKPPLINGLYTNRTVIKATAVRHSKKHFDCRAEGTPSPEVMWIMPDNIFLTAPYYGSRITVHKNGTLEIRNVRLSDSADFICVARNEGGESVLVVQLEVLEMLRRPTFRNPFNEKIVAQLGKSTALNCSVDGNPPPEIIWILPNGTRFSNGPQSYQYLIASNGSFIISKTTREDAGKYRCAARNKVGYIEKLVILEIGQKPVILTYAPGTVKGISGESLSLHCVSDGIPKPNIKWTMPSGYVVDRPQINGKYILHDNGTLVIKEATAYDRGNYICKAQNSVGHTLITVPVMIVAYPPRITNRPPRSIVTRTGAAFQLHCVALGVPKPEITWEMPDHSLLSTASKERTHGSEQLHLQGTLVIQNPQTSDSGIYKCTAKNPLGSDYAATYIQVILEGKGGRA

SEQ ID NO: 681 - DNA, 2011 bp, Homo sapiens
  CDS (2)..(2011)
aggctccgcggccgcccccttcaccctcgagggggacaaattactactgaactgctcagccactggggagcccaaaccccaaataatgtggaggttaccatccaaggctgtggtcgaccagcagcatagagtgggcagctggatccacgtctaccctaatggatccctgtttattggatcagtaacagaaaaagacagtggtgtctacttgtgtgtggcaagaaacaaaatgggggatgatctgatactgatgcatgttagcctaagactgaaacctgccaaaattgaccacaagcagtattttagaaagcaagtgctccatgggaaagatttccaagtagattgcaaagcttccggctccccagtgccagagatatcttggagtttgcctgatggaaccatgatcaacaatgcaatgcaagccgatgacagtggccacaggactaggagatatacccttttcaacaatggaactttatacttcaacaaagttggggtagcggaggaaggagattatacttgctatgcccagaacaccctagggaaagatgaaatgaaggtccacttaacagttataacagctgctccccggataaggcagagtaacaaaaccaacaagagaatcaaagctggagacacagctgtccttgactgtgaggtcactggggatcccaaaccaaaaatattttggttgctgccttccaatgacatgatttccttctccattgataggtacacatttcatgccaatgggtctttgaccatcaacaaagtgaaactgctcgattctggagagtacgtatgtgtagcccgaaatcccagtggggatgacaccaaaatgtacaaactggatgtggtctctaaacctccattaatcaatggtctgtatacaaatagaactgttattaaagccacagctgtgagacattccaaaaaacactttgactgcagagctgaagggacaccatctcctgaagtcatgtggatcatgccagacaatattttcctcacagccccatactatggaagcagaatcacagtccataaaaatggaaccttggaaattaggaatgtgaggctttcagattcagccgactttatctgtgtggcccgaaatgaaggtggagagagcgtgttggtagtacagttagaagtactggaaatgctgagaagaccgacatttagaaatccatttaatgaaaaaatagttgcccagctgggaaagtccacagcattgaattgctctgttgatggtaacccaccacctgaaataatctggattttaccaaatggcacacgattttccaatggaccacaaagttatcagtatctgatagcaagcaatggttcttttatcatttctaaaacaactcgggaggatgcaggaaaatatcgctgtgcagctaggaataaagttggctatattgagaaattagtcatattagaaattggccagaagccagttattcttacctatgcaccagggacagtaaaaggcatcagtggagaatctctatcactgcattgtgtgtctgatggaatccctaagccaaatatcaaatggactatgccaagtggttatgtagtagacaggcctcaaattaatgggaaatacatattgcatgacaatggcaccttagtcattaaagaagcaacagcttatgacagaggaaactatatctgtaaggctcaaaatagtgttggtcatacactgattactgttccagtaatgattgtagcctaccctccccgaattacaaatcgtccacccaggagtattgtcaccaggacaggggcagcctttcagctccactgtgtggccttgggagttcccaagccagaaatcacgtgggagatgcctgaccactcccttctctcaacggcaagtaaagagaggacacatggaagtgagcagcttcacttacaaggtaccctagtcattcagaatccccaaacctccgattctgggatatacaaatgcacagcactcgagggcaagggtgggcgcgcc

SEQ ID NO: 682 - protein, 670 aa, Homo sapiens; identical to SEQ ID NO: 670

SEQ ID NO: 683 - DNA, 1420 bp, Homo sapiens
  CDS (2)..(1420)
caccctcgagggggacaaattactactgaactgctcagccactggggagcccaaaccccaaataatgtggaggttaccatccaaggctgtggtcgaccagcagcataggtacacatttcatgccaatgggtctttgaccatcaacaaagtgaaactgctcgattctggagagtacgtatgtgtagcccgaaatcccagtggggatgacaccaaaatgtacaaactggatgtggtctctaaacctccattaatcaatggtctgtatacaaatagaactgttattaaagccacagctgtgagacattccaaaaaacactttgactgcagagctgaagggacaccatctcctgaagtcatgtggatcatgccagacaatattttcctcacagccccatactatggaagcagaatcacagtccataaaaatggaaccttggaaattaggaatgtgaggctttcagattcagccgactttatctgtgtggcccgaaatgaaggtggagagagcgtgttggtagtacagttagaagtactggaaatgctgagaagaccgacatttagaaatccatttaatgaaaaaatagttgcccagctgggaaagtccacagcattgaattgctctgttgatggtaacccaccacctgaaataatctggattttaccaaatggcacacgattttccaatggaccacaaagttatcagtatctgatagcaagcaatggttcttttatcatttctaaaacaactcgggaggatgcaggaaaaaatcgctgtgcagctaggaataaagttggctatattgagaaattagtcatattagaaattggccagaagccagttattcttacctatgcaccagggacagtaaaaggcatcagtggagaatctctatcactgcattgtgtgtctgatggaatccctaagccaaatatcaaatggactatgccaagtggttatgtagtagacaggcctcaaattaatgggaaatacatattgcatgacaatggcaccttagtcattaaagaagcaacagcttatgacagaggaaactatatctgtaaggctcaaaatagtgttggtcatacactgattactgttccagtaatgattgtagcctaccctccccgaattacaaatcgtccacccaggagtattgtcaccaggacaggggcagcctttcagctccactgtgtggccttgggagttcccaagccagaaatcacgtgggagatgcctgaccactcccttctctcaacggcaagtaaagagaggacacatggaagtgagcagcttcacttacaaggtaccctagtcattcagaatccccaaacctccgattctgggatatacaaatgcacagcaaagaacccacttggtagtgattatgcagcaacgtatattcaagtaatcctcgagggc

SEQ ID NO: 684 - protein, 473 aa, Homo sapiens
TLEGDKLLLNCSATGEPKPQIMWRLPSKAVVDQQHRYTFHANGSLTINKVKLLDSGEYVCVARNPSGDDTKMYKLDVVSKPPLINGLYTNRTVIKATAVRHSKKHFDCRAEGTPSPEVMWIMPDNIFLTAPYYGSRITVHKNGTLEIRNVRLSDSADFICVARNEGGESVLVVQLEVLEMLRRPTFRNPFNEKIVAQLGKSTALNCSVDGNPPPEIIWILPNGTRFSNGPQSYQYLIASNGSFIISKTTREDAGKNRCAARNKVGYIEKLVILEIGQKPVILTYAPGTVKGISGESLSLHCVSDGIPKPNIKWTMPSGYVVDRPQINGKYILHDNGTLVIKEATAYDRGNYICKAQNSVGHTLITVPVMIVAYPPRITNRPPRSIVTRTGAAFQLHCVALGVPKPEITWEMPDHSLLSTASKERTHGSEQLHLQGTLVIQNPQTSDSGIYKCTAKNPLGSDYAATYIQVILEG

SEQ ID NO: 685 - DNA, 1372 bp, Homo sapiens
  CDS (2)..(1372)
caccctcgagggggacaaattactactgaactgctcagccactggggagcccaaaccccaaataatgtggaggttaccatccaaggctgtggtcgaccagcagcataggtacacatttcatgccaatgggtctttgaccatcaacaaagtgaaactgctcgattctggagagtacgtatgtgtagcccgaaatcccagtggggatgacaccaaaatgtacaaactggatgtggtctctaaacctccattaatcaatggtctgtatacaaacagaactgttattaaagccacagctgtgagacattccaaaaaacactttgactgcagagctgaagggacaccatctcctgaagtcatgtggatcatgccagacaatattttcctcacagccccatactatggaagcagaatcacagtccataaaaatggaaccttggaaattaggaatgtgaggctttcagattcagccgactttatctgtgtggcccgaaatgaaggtggagagagcgtgttggtagtacagttagaagtactggaaatgctgagaagaccgacatttagaaatccatttaatgaaaaaatagttgcccagctgggaaagtccacagcattgaattgctctgttgatggtaacccaccacctgaaataatctggattttaccaaatggcacacgattttccaatggaccacaaagttatcagtatctgatagcaagcaatggttcttttatcatttctaaaacaactcgggaggatgcaggaaaatatcgctgtgcagctaggaataaagttggctatattgagaaattagtcatattagaaattggccagaagccagttattcttacctatgcaccagggacagtaaaaggcatcagtggagaatctctatcactgcattgtgtgtctgatggaatccctaagccaaatatcaaatggactatgccaagtggttatgtagtagacaggcctcaaattaatgggaaatacatattgcatgacaatggcaccttagtcattaaagaagcaacagcttatgacagaggaaactatatctgtaaggctcaaaatagtgttggtcatacactgattactgttccagtaatgattgtagcctaccctccccgaattacaaatcgtccacccaggagtattgtcaccaggacaggggcagcctttcagctccactgtgtggccttgggagttcccaagccagaaatcacatgggagatgcctgaccactcccttctctcaacggcaagtaaagagaggacacatcgaagtgagcagcttcacttacaaggtaccctagtcattcagaatccccaaacctccgattctgggatatacaaatgcacagcactcgagggc

SEQ ID NO: 686 - protein, 457 aa, Homo sapiens
TLEGDKLLLNCSATGEPKPQIMWRLPSKAVVDQQHRYTFHANGSLTINKVKLLDSGEYVCVARNPSGDDTKMYKLDVVSKPPLINGLYTNRTVIKATAVRHSKKHFDCRAEGTPSPEVMWIMPDNIFLTAPYYGSRITVHKNGTLEIRNVRLSDSADFICVARNEGGESVLVVQLEVLEMLRRPTFRNPFNEKIVAQLGKSTALNCSVDGNPPPEIIWILPNGTRFSNGPQSYQYLIASNGSFIISKTTREDAGKYRCAARNKVGYIEKLVILEIGQKPVILTYAPGTVKGISGESLSLHCVSDGIPKPNIKWTMPSGYVVDRPQINGKYILHDNGTLVIKEATAYDRGNYICKAQNSVGHTLITVPVMIVAYPPRITNRPPRSIVTRTGAAFQLHCVALGVPKPEITWEMPDHSLLSTASKERTHRSEQLHLQGTLVIQNPQTSDSGIYKCTALEG

SEQ ID NO: 687 - DNA, 1383 bp, Homo sapiens
  CDS (2)..(1381)
caccctcgagggggacaaattactactgaactgctcagccactggggagcccaaaccccaaataatgtggaggttaccatccaaggctgtggtcgaccagcagcataggtacacatttcatgccaatgggtctttgaccatcaacaaagtgaaactgctcgattctggagagtacgtatgtgtagcccgaaatcccagtggggatgacaccaaaatgtacaaactggatgtggtctctaaacctccattaatcaatggtctgtatacaaatagaactgttattaaagccacagctgtgagacattccaaaaaacactttgactgcagagctgaagggacaccatctcctgaagtcatgtggatcatgccagacaatattttcctcacagccccatactatggaagcagaatcacagtccataaaaatggaaccttggaaattaggaatgtgaggctttcagattcagccgactttatctgtgtggcccgaaatgaaggtggagagagcgtgttggtagtacagttagaagtactggaaatgctgagaagaccgacatttagaaatccatttaatgaaaaaatagttgcccagctgggaaagtccacagcattgaattgctctgttgatggtaacccaccaccggaaataatctggattttaccaaatggcacacgattttccaatggaccacaaagttatcagtatctgatagcaagcaatggttcttttatcatttctaaaacaactcgggaggatgcaggaaaatatcgctgtgcagctaggaataaagttggctatattgagaaattagtcatattagaaattggccagaagccagttattcttacctatgcaccagggacagtaaaaggcatcagtggagaatctctatcactgcattgtgtgtctgatggaatccctaagccaaatatcaaatggactatgccaagtggttatgtagtagacaggcctcaaattaatgggaaatacatattgcatgacaatggcaccttagtcattaaagaagcaacagcttatgacagaggaaactatatctgtaaggctcaaaatagtgttggtcatacactgattactgttccagtaatgattgtagcctaccctccccgaattacaaatcgtccacccaggagtattgtcaccaggacaggggcagcctttcagctccactgtgtggccttgggagttcccaagccagaaatcacgtgggagatgcctgaccactcccttctctcaacggcaagtaaagagaggacacatggaagtgagcagcttcacttacaaggtaccctagtcattcagaatccccaaacctccgattctgggatatacaaatgcacagcactcgagggcaagggcgaatc

SEQ ID NO: 688 - protein, 460 aa, Homo sapiens
TLEGDKLLLNCSATGEPKPQIMWRLPSKAVVDQQHRYTFHANGSLTINKVKLLDSGEYVCVARNPSGDDTKMYKLDVVSKPPLINGLYTNRTVIKATAVRHSKKHFDCRAEGTPSPEVMWIMPDNIFLTAPYYGSRITVHKNGTLEIRNVRLSDSADFICVARNEGGESVLVVQLEVLEMLRRPTFRNPFNEKIVAQLGKSTALNCSVDGNPPPEIIWILPNGTRFSNGPQSYQYLIASNGSFIISKTTREDAGKYRCAARNKVGYIEKLVILEIGQKPVILTYAPGTVKGISGESLSLHCVSDGIPKPNIKWTMPSGYVVDRPQINGKYILHDNGTLVIKEATAYDRGNYICKAQNSVGHTLITVPVMIVAYPPRITNRPPRSIVTRTGAAFQLHCVALGVPKPEITWEMPDHSLLSTASKERTHGSEQLHLQGTLVIQNPQTSDSGIYKCTALEGKGE

SEQ ID NO: 689 - DNA, 1372 bp, Homo sapiens
  CDS (2)..(1372)
caccctcgagggggacaaattactactgaactgctcagccactggggagcccaaaccccaaataatgtggaggttaccatccaaggctgtggtcgaccagcagcataggtacacatttcatgccaatgggtcgttgaccatcaacaaagtgaaactgctcgattctggagagtacgtatgtgtagcccgaaatcccagtggggatgacaccaaaatgtacaaactggatgtggtctctaaacctccattaatcaatggtctgtatacaaacagaactgttattaaagccacagctgtgagacattccaaaaaacactttgactgcagagctgaagggacaccatctcctgaagtcatgtggatcatgccagacaatattttcctcacagccccatactatggaagcagaatcacagtccataaaaatggaaccttggaaattaggaatgtgaggctttcagattcagccgactttatctgtgtggcccgaaatgaaggtggagagagcgtgttggtagtacagttagaagtactggaaatgctgagaagaccgacatttagaaatccatttaatgaaaaaatagttgcccagctgggaaagtccacagcattgaattgctctgttgatggtaacccaccaccggaaataatctggattttaccaaatggcacacgattttccaatggaccacaaagttatcagtatctgatagcaagcaatggttcttttatcatttctaaaacaactcgggaggatgcaggaaaatatcgctgtgcagctaggaataaagttggctatattgagaaattagtcatattagaaattggccagaagccagttattcttacctatgcaccagggacagtaaaaggcatcagtggagaatctctatcactgcattgtgtgtctgatggaatccctaagccaaatatcaaatggactatgccaagtggttatgtagtagacaggcctcaaattaatgggaaatacatattgcatgacaatggcaccttagtcattaaagaagcaacagcttatgacagaggaaactatatctgtaaggctcaaaatagtgttggtcatacactgattactgttccagtaatgattgtagcctaccctccccgaattacaaatcgtccacccaggagtattgtcaccaggacaggggcagcctttcagctccactgtgtggccttgggagttcccaagccagaaatcacgtgggagatgcctgaccactcccttctctcaacggcaagtaaagagaggacacatggaagtgagcagcttcacttacaaggtaccctagtcattcagaatccccaaacctccgattctgggatatacaaatgcacagcactcgagggc

SEQ ID NO: 690 - protein, 457 aa, Homo sapiens
TLEGDKLLLNCSATGEPKPQIMWRLPSKAVVDQQHRYTFHANGSLTINKVKLLDSGEYVCVARNPSGDDTKMYKLDVVSKPPLINGLYTNRTVIKATAVRHSKKHFDCRAEGTPSPEVMWIMPDNIFLTAPYYGSRITVHKNGTLEIRNVRLSDSADFICVARNEGGESVLVVQLEVLEMLRRPTFRNPFNEKIVAQLGKSTALNCSVDGNPPPEIIWILPNGTRFSNGPQSYQYLIASNGSFIISKTTREDAGKYRCAARNKVGYIEKLVILEIGQKPVILTYAPGTVKGISGESLSLHCVSDGIPKPNIKWTMPSGYVVDRPQINGKYILHDNGTLVIKEATAYDRGNYICKAQNSVGHTLITVPVMIVAYPPRITNRPPRSIVTRTGAAFQLHCVALGVPKPEITWEMPDHSLLSTASKERTHGSEQLHLQGTLVIQNPQTSDSGIYKCTALEG

SEQ ID NO: 691 - DNA, 1420 bp, Homo sapiens
  CDS (2)..(1420)
caccctcgagggggacaaattactactgaactgctcagccactggggagcccaaaccccaaataatgtggaggttaccatccaaggctgtggtcgaccagcagcataggtacacatttcatgccaatgggtctttgaccatcaacaaagtgaaactgctcgattctggagagtacgtatgtgtagcccgaaatcccagtggggatgacaccaaaatgtacaaactggatgtggtctctaaacctccattaatcaatggtctgtatacaaatagaactgttattaaagccacagctgtgagacattccaaaaaacactttgactgcagagctgaagggacaccatctcctgaagtcatgtggatcatgccagacaatattttcctcacagccccatactatggaagcagaatcacagtccataaaaatggaaccttggaaattaggaatgtgaggctttcagattcagccgactttatctgtgtggcccgaaatgaaggtggagagagcgtgttggtagtacagttagaagtactggaaatgctgagaagaccgacatttagaaatccatttaatgaaaaaatagttgcccagctgggaaagtccacagcattgaattgctctgttgatggtaacccaccacctgaaataatctggattttaccaaatggcacacgattttccaatggaccacaaagttatcagtatctgatagcaagcaatggttcttttatcatttctaaaacaactcgggaggatgcaggaaaatatcgctgtgcagctaggaataaagttggctatattgagaaattagtcatattagaaattggccagaagccagttattcttacctatgcaccagggacagtaaaaggcatcagtggagaatctctatcactgcattgtgtgtctgatggaatccctaagccaaatatcaaatggactatgccaagtggttatgtagtagacaggcctcaaattaatgggaaatacatattgcatgacaatggcaccttagtcattaaagaagcaacagcttatgacagaggaaactatatctgtaaggctcaaaatagtgttggtcatacactgattactgttccagtaatgattgtagcctaccctccccgaattacaaatcgtccacccaggagtattgtcaccaggacaggggcagcctttcagctccactgtgtggccttgggagttcccaagccagaaatcacgtgggagatgcctgaccactcccttctctcaacggcaagtaaagagaggacacatggaagtgagcagcttcacttacaaggtaccctagtcattcagaatccccaaacctccgattctgggatatacaaatgcacagcaaagaacccacttggtagtgattatgcagcaacgtatattcaagtaatcctcgagggc

SEQ ID NO: 692 - protein, 473 aa, Homo sapiens
TLEGDKLLLNCSATGEPKPQIMWRLPSKAVVDQQHRYTFHANGSLTINKVKLLDSGEYVCVARNPSGDDTKMYKLDVVSKPPLINGLYTNRTVIKATAVRHSKKHFDCRAEGTPSPEVMWIMPDNIFLTAPYYGSRITVHKNGTLEIRNVRLSDSADFICVARNEGGESVLVVQLEVLEMLRRPTFRNPFNEKIVAQLGKSTALNCSVDGNPPPEIIWILPNGTRFSNGPQSYQYLIASNGSFIISKTTREDAGKYRCAARNKVGYIEKLVILEIGQKPVILTYAPGTVKGISGESLSLHCVSDGIPKPNIKWTMPSGYVVDRPQINGKYILHDNGTLVIKEATAYDRGNYICKAQNSVGHTLITVPVMIVAYPPRITNRPPRSIVTRTGAAFQLHCVALGVPKPEITWEMPDHSLLSTASKERTHGSEQLHLQGTLVIQNPQTSDSGIYKCTAKNPLGSDYAATYIQVILEG

SEQ ID NO: 693 - DNA, 1420 bp, Homo sapiens
  CDS (2)..(1420)
caccctcgagggggacaaattactactgaactgctcagccactggggagcccaaaccccaaataatgtggaggttaccatccaaggctgtggtcgaccagcagcataggtacacatttcatgccaatgggtcgttgaccatcaacaaagtgaaactgctcgattctggagagtacgtatgtgtagcccgaaatcccagtggggatgacaccaaaatgtacaaactggatgtggtctctaaacctccattaatcaatggtctgtatacaaacagaactgttattaaagccacagctatgagacattccaaaaaacactttgactgcagagctgaagggacaccatctcctgaagtcatgtggatcatgccagacaatattttcctcacagccccatactatggaagcagaatcacagtccataaaaatggaaccttggaaattaggaatgtgaggctttcagattcagccgactttatctgtgtggcccgaaatgaaggtggagagagcgtgttggtagtacagttagaagtactggaaatgctgagaagaccgacatttagaaatccatttaatgaaaaaatagttgcccagctgggaaagtccacagcattgaattgctctgttgatggtaacccaccaccggaaataatctggattttaccaaatggcacacgattttccaatggaccacaaagttatcagtatctgatagcaagcaatggttcttttatcatttctaaaacaactcgggaggatgcaggaaaatatcgctgtgcagctaggaataaagttggctatattgagaaattagtcatattagaaattggccagaagccagttattcttacctatgcaccagggacagtaaaaggcatcagtggagaatctctatcactgcattgtgtgtctgatggaatccctaagccaaatatcaaatggactatgccaagtggttatgtagtagacaggcctcaaattaatgggaaatacatattgcatgacaatggcaccttagtcattaaagaagcaacagcttatgacagaggaaactatatctgtaaggctcaaaatagtgttggtcatacactgattactgttccagtaatgattgtagcctaccctccccgaattacaaatcgtccacccaggagtattgtcaccaggacaggggcagcctttcagctccactgtgtggccttgggagttcccaagccagaaatcacgtgggagatgcctgaccactcccttctctcaacggcaagtaaagagaggacacatggaagtgagcagcttcacttacaaggtaccctagtcattcagaatccccaaacctccgattctgggatatacaaatgcacagcaaagaacccacttggtagtgattatgcagcaacgtatattcaagtaatcctcgagggc

SEQ ID NO: 694 - protein, 473 aa, Homo sapiens
TLEGDKLLLNCSATGEPKPQIMWRLPSKAVVDQQHRYTFHANGSLTINKVKLLDSGEYVCVARNPSGDDTKMYKLDVVSKPPLINGLYTNRTVIKATAMRHSKKHFDCRAEGTPSPEVMWIMPDNIFLTAPYYGSRITVHKNGTLEIRNVRLSDSADFICVARNEGGESVLVVQLEVLEMLRRPTFRNPFNEKIVAQLGKSTALNCSVDGNPPPEIIWILPNGTRFSNGPQSYQYLIASNGSFIISKTTREDAGKYRCAARNKVGYIEKLVILEIGQKPVILTYAPGTVKGISGESLSLHCVSDGIPKPNIKWTMPSGYVVDRPQINGKYILHDNGTLVIKEATAYDRGNYICKAQNSVGHTLITVPVMIVAYPPRITNRPPRSIVTRTGAAFQLHCVALGVPKPEITWEMPDHSLLSTASKERTHGSEQLHLQGTLVIQNPQTSDSGIYKCTAKNPLGSDYAATYIQVILEG

SEQ ID NO: 695 - DNA, 1420 bp, Homo sapiens
  CDS (2)..(1420)
caccctcgagggggacaaattactactgaactgctcagccactggggagcccaaaccccaaataatgtggaggttacaatccaaggctgtggtcgaccagcagcataggtacacatttcatgccaatgggtcgttgaccatcaacaaagtgaaactgctcgattctggagagtacgtatgtgtagcccgaaatcccagtggggatgacaccaaaatgtacaaactggatgtggtatctaaacctccattaatcaatggtctgtatacaaacagaactgttattaaagccacagctgtgagacattccaaaaaacactttgactgcagagctgaagggacaccatctcctgaagtcatgtggatcatgccagacaatattttcctcacagccccatactatggaagcagaatcacagtccataaaaatggaaccttggaaattaggaatgtgaggctttcagattcagccgactttatctgtgtggcccgaaatgaaggtggagagagcgtgttggtagtacagttagaagtactggaaatgctgagaagaccggcatttagaaatccatttaatgaaaaaatagttgcccagctgggaaagtccacagcattgaattgctctgttgatggtaacccaccaccggaaataatctggattttaccaaatggcacacgattttccaatggaccacaaagttatcagtatctgatagcaagcaatggttcttttatcatttctaaaacaactcgggaggatgcaggaaaatatcgctgtgcagctaggaataaagttggctatattgagaaattagtcatattagaaattggccagaagccagttattcttacctatgcaccagggacagtaaaaggcatcagtggagaatctctatcactgcattgtgtgtctgatggaatccctaagccaaatatcaaatggactatgccaagtggttatgtagtagacaggcctcaaattaatgggaaatacatattgcatgacaatggcaccttagtcattaaagaagcaacagcttatgacagaggaaactatatctgtaaggctcaaaatagtgttggtcatacactgattactgttccagtaatgattgtagcctaccctccccgaattacaaatcgtccacccaggagtattgtcaccaggacaggggcagcctttcagctccactgtgtggccttgggagttcccaagccagaaatcacgtgggagatgcctgaccactcccttctctcaacggcaagtaaagagaggacacatggaagtgagcagcttcacttacaaggtaccctagtcattcagaatccccaaacctccgattctgggatatacaaatgcacagcaaagaacccacttggtagtgattatgcagcaacgtatattcaagtaatcctcgagggc

SEQ ID NO: 696 - protein, 473 aa, Homo sapiens
TLEGDKLLLNCSATGEPKPQIMWRLQSKAVVDQQHRYTFHANGSLTINKVKLLDSGEYVCVARNPSGDDTKMYKLDVVSKPPLINGLYTNRTVIKATAVRHSKKHFDCRAEGTPSPEVMWIMPDNIFLTAPYYGSRITVHKNGTLEIRNVRLSDSADFICVARNEGGESVLVVQLEVLEMLRRPAFRNPFNEKIVAQLGKSTALNCSVDGNPPPEIIWILPNGTRFSNGPQSYQYLIASNGSFIISKTTREDAGKYRCAARNKVGYIEKLVILEIGQKPVILTYAPGTVKGISGESLSLHCVSDGIPKPNIKWTMPSGYVVDRPQINGKYILHDNGTLVIKEATAYDRGNYICKAQNSVGHTLITVPVMIVAYPPRITNRPPRSIVTRTGAAFQLHCVALGVPKPEITWEMPDHSLLSTASKERTHGSEQLHLQGTLVIQNPQTSDSGIYKCTAKNPLGSDYAATYIQVILEG

SEQ ID NO: 697 - DNA, 1420 bp, Homo sapiens
  CDS (2)..(1420)
caccctcgagggggacaaattactactgaactgctcagccactggggagcccaaacaccaaataatgtggaggttaccatccaaggctgtggtcgaccagcagcataggtacacatttcatgccaatgggtctttgaccatcaacaaagtgaaactgctcgattctggagagtacgtatgtgtagcccgaaatcccagtggggatgacaccaaaatgtacaaactggatgtggtctctaaacctccattaatcaatggtctgtatacaaatagaactgttattaaagccacagctgtgagacattccaaaaaacactttgactgcagagctgaagggacaccatctcctgaagtcatgtggatcatgccagacaatattttcctcacagccccatactatggaagcagaatcacagtccataaaaatggaaccttggaaattaggaatgtgaggctttcagattcagccgactttatctgtgtggcccgaaatgaaggtggagagagcgtgttggtagtacagttagaagtactggaaatgctgagaagaccgacatttagaaatccatttaatgaaaaaatagttgcccagctgggaaagtccacagcattgaattgctctgttgatggtaacccaccacctgaaataatctggattttaccaaatggcacacgattttccaatggaccacaaagttatcagtatctgatagcaagcaatggttcttttatcatttctaaaacaactcgggaggatgcaggaaaatatcgctgtgcagctaggaataaagttggctatattgagaaattagtaatattagaaattggccagaagccagttattcttacctatgcaccagggacagtaaaaggcatcagtggagaatctctatcactgcattgtgtgtctgatggaatccctaagccaaatatcaaatggactatgccaagtggttatgtagtagacaggcctcaaattaatgggaaatacatattgcatgacaatggcaccttagtcattaaagaagcaacagcttatgacagaggaaactatatatgtaaggctcaaaatagtgttggtcatacactgattactgttccagtaatgattgtagcctaccctccccgaattacaaatcgtccacccaggagtattgtcaccaggacaggggcagcctttcagctccactgtgtggccttgggagttcccaagccagaaatcacgtgggagatgtctgaccactcccttctctcaacggcaagtaaagagaggacacatggaagtgagcagcttcacttacaaggtaccctagtcattcagaatccccaaacctccgattctgggatatacaaatgcacagcaaagaacccacttggtagtgattatgcagcaacgtatattcaagtaatcctcgagggc

SEQ ID NO: 698 - protein, 473 aa, Homo sapiens
TLEGDKLLLNCSATGEPKHQIMWRLPSKAVVDQQHRYTFHANGSLTINKVKLLDSGEYVCVARNPSGDDTKMYKLDVVSKPPLINGLYTNRTVIKATAVRHSKKHFDCRAEGTPSPEVMWIMPDNIFLTAPYYGSRITVHKNGTLEIRNVRLSDSADFICVARNEGGESVLVVQLEVLEMLRRPTFRNPFNEKIVAQLGKSTALNCSVDGNPPPEIIWILPNGTRFSNGPQSYQYLIASNGSFIISKTTREDAGKYRCAARNKVGYIEKLVILEIGQKPVILTYAPGTVKGISGESLSLHCVSDGIPKPNIKWTMPSGYVVDRPQINGKYILHDNGTLVIKEATAYDRGNYICKAQNSVGHTLITVPVMIVAYPPRITNRPPRSIVTRTGAAFQLHCVALGVPKPEITWEMSDHSLLSTASKERTHGSEQLHLQGTLVIQNPQTSDSGIYKCTAKNPLGSDYAATYIQVILEG

SEQ ID NO: 699 - DNA, 635 bp, Homo sapiens
  CDS (3)..(635)
aggctccgcggccgcccccttcaccctcgagtgtcctcgccgctgtgcctgttatatgcaccctcgagtgtcctcgccgctgtgcctgttatatgcctacggaggtacactgcacatttcggtacctgacttccatcccagacagcatcccgcccaatgtggaacgcatcaatttaggatacaacagcttggttagattgatggaaacagatttttctggcctgaccaaactggagttactcatgcttcacagcaatggcattcacacaatccctgacaagaccttctcagatttgcaggccttgcaggtcttaaaaatgagctataacaaagtccgaaaacttcagaaagatactttttatggcctcaggagcttgacacgattgcacatggaccacaacaatattgagtttataaacccagaggtttttgatgggctcaactttctccgcctggtgcacttggaaggaaatcagctcactaagctccacccagatacatttgtctctttgagctacctccagatatttaaaatctctttcattaagttcctatacttgtctgataacttcctgacctccctccctcaagagatggtctcctatatgcctctcgagggcaagggtgggcgcgcc

SEQ ID NO: 700 - protein, 211 aa, Homo sapiens
APRPPPSPSSVLAAVPVICTLECPRRCACYMPTEVHCTFRYLTSIPDSIPPNVERINLGYNSLVRLMETDFSGLTKLELLMLHSNGIHTIPDKTFSDLQALQVLKMSYNKVRKLQKDTFYGLRSLTRLHMDHNNIEFINPEVFDGLNFLRLVHLEGNQLTKLHPDTFVSLSYLQIFKISFIKFLYLSDNFLTSLPQEMVSYMPLEGKGGRA

SEQ ID NO: 701 - DNA, 646 bp, Homo sapiens
  CDS (2)..(646)
caccctcgagatgaaggtaaaaggcagaggaatcacctgcttgctggtctcctttgctgtgatctgcctggtcgccacccctgggggcaaggcctgtcctcgccgctgtgcctgttatatgcctacggaggtacactgcacatttcggtacctgacttccatcccagacagcatcccgcccaatgtggaacgcatcaatttaggatacaacagcttggttagattgatggaaacagatttttctggcctgaccaaactggagttactcatgcttcacagcaatggcattcacacaatccctgacaagaccttctcagatttgcaggccttgcaggtcttaaaaatgagctataacaaagtccgaaaacttcagaaagatactttttatggcctcaggagcttgacacgattgcacatggaccacaacaatattgagtttataaacccagaggttttttatgggctcaactttctccgcctggtgcacttggaaggaaatcagctcactaagctccacccagatacatttgtctctttgagctacctccagatatttaaaatctctttcattaagttcctatacttgtctgataacttcctgacctccctccctcaagagatggtctcctatatgcctctcgagggc

SEQ ID NO: 702 - protein, 215 aa, Homo sapiens
TLEMKVKGRGITCLLVSFAVICLVATPGGKACPRRCACYMPTEVHCTFRYLTSIPDSIPPNVERINLGYNSLVRLMETDFSGLTKLELLMLHSNGIHTIPDKTFSDLQALQVLKMSYNKVRKLQKDTFYGLRSLTRLHMDHNNIEFINPEVFYGLNFLRLVHLEGNQLTKLHPDTFVSLSYLQIFKISFIKFLYLSDNFLTSLPQEMVSYMPLEG

SEQ ID NO: 703 - DNA, 646 bp, Homo sapiens; identical to SEQ ID NO: 701
  CDS (2)..(646)

SEQ ID NO: 704 - protein, 215 aa, Homo sapiens; identical to SEQ ID NO: 702

SEQ ID NO: 705 - DNA, 646 bp, Homo sapiens; identical to SEQ ID NO: 701
  CDS (2)..(646)

SEQ ID NO: 706 - protein, 215 aa, Homo sapiens; identical to SEQ ID NO: 702

SEQ ID NO: 707 - DNA, 646 bp, Homo sapiens; identical to SEQ ID NO: 701
  CDS (2)..(646)

SEQ ID NO: 708 - protein, 215 aa, Homo sapiens; identical to SEQ ID NO: 702

SEQ ID NO: 709 - DNA, 2011 bp, Homo sapiens
  CDS (2)..(2011)
aggctccgcggccgcccccttcaccctcgagggggacaaattactactgaactgctcagccactggggagcccaaaccccaaataatgtggaggttaccatccaaggctgtggtcgaccagcagcatagagtgggcagctggatccacgtctaccctaatggatccctgtttattggatcagtaacagaaaaagacagtggtgtctacttgtgtgtggcaagaaacaaaatgggggatgatctgatactgatgcatgttagcctaagactgaaacctgccaaaattgaccacaagcagtattttagaaagcaagtgctccatgggaaagatttccaagtagattgcaaagcttccggctccccagtgccagagatatcttggagtttgcctgatggaaccatgatcaacaatgcaatgcaagccgatgacagtggccacaggactaggagatatacccttttcaacaatggaactttatacttcaacaaagttggggtagcggaggaaggagattatacttgctatgcccagaacaccctagggaaagatgaaatgaaggtccacttaacagttataacagctgctccccggataaggcagagtaacaaaaccaacaagagaatcaaagctggagacacagctgtccttgactgtgaggtcactggggatcccaaaccaaaaatattttggttgctgccttccaatgacatgatttccttctccattgataggtacacatttcatgccaatgggtctttgaccatcaacaaagtgaaactgctcgattctggagagtacgtatgtgtagcccgaaatcccagtggggatgacaccaaaatgtacaaactggatgtggtctctaaacctccattaatcaatggtctgtatacaaatagaactgttattaaagccacagctgtgagacattccaaaaaacactttgactgcagagctgaagggacaccatctcctgaagtcatgtggatcatgccagacaatattttcctcacagccccatactatggaagcagaatcacagtccataaaaatggaaccttggaaattaggtatgtgaggctttcagattcagccgactttatctgtgtggcccgaaatgaaggtggagagagcgtgttggtagtacagttagaagtactggaaatgctgagaagaccgacatttagaaatccatttaatgaaaaaatagttgcccagctgggaaagtccacagcattgaattgctctgttgatggtaacccaccacctgaaataatctggattttaccaaatggcacacgattttccaatggaccacaaagttatcagtatctgatagcaagcaatggttcttttatcatttctaaaacaactcgggaggatgcaggaaaatatcgctgtgcagctaggaataaagttggctatattgagaaattagtcatattagaaattggccagaagccagttattcttacctatgcaccagggacagtaaaaggcatcagtggagaatctctatcactgcattgtgtgtctgatggaatccctaagccaaatatcaaatggactatgccaagtggttatgtagtagacaggcctcaaattaatgggaaatacatattgcatgacaatggcaccttagtcattaaagaagcaacagcttatgacagaggaaactatatctgtaaggctcaaaatagtgttggtcatacactgattactgttccagtaatgattgtagcctaccctccccgaattacaaatcgtccacccaggagtattgtcaccaggacaggggcagcctttcagctccactgtgtggccttgggagttcccaagccagaaatcacgtgggagatgcctgaccactcccttctctcaacggcaagtaaagagaggacacatggaagtgagcagcttcacttacaaggtaccctagtcattcagaatccccaaacctccgattctgggatatacaaatgcacagcactcgagggcaagggtgggcgcgcc

SEQ ID NO: 710 - protein, 670 aa, Homo sapiens
GSAAAPFTLEGDKLLLNCSATGEPKPQIMWRLPSKAVVDQQHRVGSWIHVYPNGSLFIGSVTEKDSGVYLCVARNKMGDDLILMHVSLRLKPAKIDHKQYFRKQVLHGKDFQVDCKASGSPVPEISWSLPDGTMINNAMQADDSGHRTRRYTLFNNGTLYFNKVGVAEEGDYTCYAQNTLGKDEMKVHLTVITAAPRIRQSNKTNKRIKAGDTAVLDCEVTGDPKPKIFWLLPSNDMISFSIDRYTFHANGSLTINKVKLLDSGEYVCVARNPSGDDTKMYKLDVVSKPPLINGLYTNRTVIKATAVRHSKKHFDCRAEGTPSPEVMWIMPDNIFLTAPYYGSRITVHKNGTLEIRYVRLSDSADFICVARNEGGESVLVVQLEVLEMLRRPTFRNPFNEKIVAQLGKSTALNCSVDGNPPPEIIWILPNGTRFSNGPQSYQYLIASNGSFIISKTTREDAGKYRCAARNKVGYIEKLVILEIGQKPVILTYAPGTVKGISGESLSLHCVSDGIPKPNIKWTMPSGYVVDRPQINGKYILHDNGTLVIKEATAYDRGNYICKAQNSVGHTLITVPVMIVAYPPRITNRPPRSIVTRTGAAFQLHCVALGVPKPEITWEMPDHSLLSTASKERTHGSEQLHLQGTLVIQNPQTSDSGIYKCTALEGKGGRA

SEQ ID NO: 711 - DNA, 2902 bp, Homo sapiens
  CDS (2)..(2902)
caccctcgagaactcagatgcctttcttccctgtgaagctgttggaaatcccctgcccaccattcattggaccagagtcccatcaggacttgatttatctaagaggaaacagaatagcagggtccaggttctccccaatggtaccctgtccatccagagggtggaaattcaggaccgcggacagtacttgtgttccgcatccaatctgtttggcacagaccaccttcatgtcaccttgtctgtggtttcctatcctcccaggatcctggagagacgtaccaaagagatcacagttcattccggaagcactgtggaactgaagtgcagagcagaaggtaggccaagccctacagttacctggattcttgcaaaccaaacagttgtctcagaatcatcccagggaagtaggcaggctgtggtgacggttgacggaacattggtcctccacaatctcagtatttatgaccgtggcttttacaaatgtgtggccagcaacccaggtggccaggattcactgctggttaaaatacaagtcattgcagcaccacctgttattctagagcaaaggaggcaagtcattgtaggcacttggggtgaaagtttaaaactgccctgtactgcaaaaggaactcctcagcccagcgtttactgggtcctctctgatggcactgaagtgaaaccattacagtttaccaattccaagttgttcttattttcaaatgggactttgtatataagaaacctagcctcttcagacaggggcacttatgaatgcattgctaccagttccactggttcggagcgaagagtagtaatgcttacaatggaagagcgagtgaccagccccaggatagaagctgcatcccagaaaaggactgaagtgaattttggggacaaattactactgaactgctcagccactggggagcccaaaccccaaataatgtggaggttaccatccaaggctgtggtcgaccagcagcatagagtgggcagctggatccacgtctaccctaatggatccctgtttattggatcagtaacagaaaaagacagtggtgtctacttgtgtgtggcaagaaacaaaatgggggatgatctgatactgatgcatgttagcctaagactgaaacctgccaaaattgaccacaagcagtattttagaaagcaagtgctccatgggaaagatttccaagtagattgcaaagcttccggctccccagtgccagagatatcttggagtttgcctgatggaaccatgatcaacaatgcaatgcaagccgatgacagtggccacaggactaggagatatacccttttcaacaatggaactttatacttcaacaaagttggggtagcggaggaaggagattatacttgctatgcccagaacaccctagggaaagatgaaatgaaggtccacttaacagttataacagctgctccccggataaggcagagtaacaaaaccaacaagagaatcaaagctggagacacagctgtccttgactgtgaggtcactggggatcccaaaccaaaaatattttggttgctgccttccaatgacatgatttccttctccattgataggtacacatttcatgccaatgggtctttgaccatcaacaaagtgaaactgctcgattctggagagtacgtatgtgtagcccgaaatcccagtggggatgacaccaaaatgtacaaactggatgtggtctctaaacctccattaatcaatggtctgtatacaaatagaactgttattaaagccacagctgtgagacattccaaaaaacactttgactgcagagctgaagggacaccatctcctgaagtcatgtggatcatgccagacaatattttcctcacagccccatactatggaagcagaatcacagtccataaaaatggaaccttggaaattaggaatgtgaggctttcagattcagccgactttatctgtgtggcccgaaatgaaggtggagagagcgtgttggtagtacagttagaagtactggaaatgctgagaagaccgacatttagaaatccatttaatgaaaaaatagttgcccagctgggaaagtccacagcattgaattgctctgttgatggtaacccaccacctgaaataatctggattttaccaaatggcacacgattttccaatggaccacaaagttatcagtatctgatagcaagcaatggttcttttatcatttctaaaacaactcgggaggatgcaggaaaatatcgctgtgcagctaggaataaagttggctatattgagaaattagtcatattagaaattggccagaagccagttattcttacctatgcaccagggacagtaaaaggcatcagtggagaatctctatcactgcattgtgtgtctgatggaatccctaagccaaatatcaaatggactatgccaagtggttatgtagtagacaggcctcaaattaatgggaaatacatattgcatgacaatggcaccttagtcattaaagaagcaacagcttatgacagaggaaactatatctgtaaggctcaaaatagtgttggtcatacactgattactgttccagtaatgattgtagcctaccctccccgaattacaaatcgtccacccaggagtattgtcaccaggacaggggcagcctttcagctccactgtgtggccttgggagttcccaagccagaaatcacgtgggagatgcctgaccactcccttctctcaacggcaagtaaagagaggacacatggaagtgagcagcttcacttacaaggtaccctagtcattcagaatccccaaacctccgattctgggatatacaaatgcacagcaaagaacccacttggtagtgattatgcagcaacgtatattcaagtaatcctcgagggc

SEQ ID NO: 712 - protein, 967 aa, Homo sapiens
TLENSDAFLPCEAVGNPLPTIHWTRVPSGLDLSKRKQNSRVQVLPNGTLSIQRVEIQDRGQYLCSASNLFGTDHLHVTLSVVSYPPRILERRTKEITVHSGSTVELKCRAEGRPSPTVTWILANQTVVSESSQGSRQAVVTVDGTLVLHNLSIYDRGFYKCVASNPGGQDSLLVKIQVIAAPPVILEQRRQVIVGTWGESLKLPCTAKGTPQPSVYWVLSDGTEVKPLQFTNSKLFLFSNGTLYIRNLASSDRGTYECIATSSTGSERRVVMLTMEERVTSPRIEAASQKRTEVNFGDKLLLNCSATGEPKPQIMWRLPSKAVVDQQHRVGSWIHVYPNGSLFIGSVTEKDSGVYLCVARNKMGDDLILMHVSLRLKPAKIDHKQYFRKQVLHGKDFQVDCKASGSPVPEISWSLPDGTMINNAMQADDSGHRTRRYTLFNNGTLYFNKVGVAEEGDYTCYAQNTLGKDEMKVHLTVITAAPRIRQSNKTNKRIKAGDTAVLDCEVTGDPKPKIFWLLPSNDMISFSIDRYTFHANGSLTINKVKLLDSGEYVCVARNPSGDDTKMYKLDVVSKPPLINGLYTNRTVIKATAVRHSKKHFDCRAEGTPSPEVMWIMPDNIFLTAPYYGSRITVHKNGTLEIRNVRLSDSADFICVARNEGGESVLVVQLEVLEMLRRPTFRNPFNEKIVAQLGKSTALNCSVDGNPPPEIIWILPNGTRFSNGPQSYQYLIASNGSFIISKTTREDAGKYRCAARNKVGYIEKLVILEIGQKPVILTYAPGTVKGISGESLSLHCVSDGIPKPNIKWTMPSGYVVDRPQINGKYILHDNGTLVIKEATAYDRGNYICKAQNSVGHTLITVPVMIVAYPPRITNRPPRSIVTRTGAAFQLHCVALGVPKPEITWEMPDHSLLSTASKERTHGSEQLHLQGTLVIQNPQTSDSGIYKCTAKNPLGSDYAATYIQVILEG

SEQ ID NO: 713 - DNA, 2902 bp, Homo sapiens
  CDS (2)..(2902)
caccagatctaactcagatgcctttcttccctgtgaagctgttggaaatcccctgcccaccattcattggaccagagtcccatcaggacttgatttatctaagaggaaacagaatagcagggtccaggttctccccaatggtaccctgtccatccagagggtggaaattcaggaccgcggacagtacttgtgttccgcatccaatctgtttggcacagaccaccttcatgtcaccttgtctgtggtttcctatcctcccaggatcctggagagacgtaccaaagagatcacagttcattccggaagcactgtggaactgaagtgcagagcagaaggtaggccaagccctacagttacctggattcttgcaaaccaaacagttgtctcagaatcatcccagggaagtaggcaggctgtggtgacggttgacggaacattggtcctccacaatctcagtatttatgaccgtggcttttacaaatgtgtggccagcaacccaggtggccaggattcactgctggttaaaatacaagtcattgcagcaccacctgttattctagagcaaaggaggcaagtcattgtaggcacttggggtgaaagtttaaaactgccctgtactgcaaaaggaactcctcagcccagcgtttactgggtcctctctgatggcactgaagtgaaaccattacagtttaccaattccaagttgttcttattttcaaatgggactttgtatataagaaacctagcctcttcagacaggggcacttatgaatgcattgctaccagttccactggttcggagcgaagagtagtaatgcttacaatggaagagcgagtgaccagccccaggatagaagctgcatcccagaaaaggactgaagtgaattttggggacaaattactactgaactgctcagccactggggagcccaaaccccaaataatgtggaggttaccatccaaggctgtggtcgaccagcagcatagagtgggcagctggatccacgtctaccctaatggatccctgtttattggatcagtaacagaaaaagacagtggtgtctacttgtgtgtggcaagaaacaaaatgggggatgatctgatactgatgcatgttagcctaagactgaaacctgccaaaattgaccacaagcagtattttagaaagcaagtgctccatgggaaagatttccaagtagattgcaaagcttccggctccccagtgccagagatatcttggagtttgcctgatggaaccatgatcaacaatgcaatgcaagccgatgacagtggccacaggactaggagatatacccttttcaacaatggaactttatacttcaacaaagttggggtagcggaggaaggagattatacttgctatgcccagaacaccctagggaaagatgaaatgaaggtccacttaacagttataacagctgctccccggataaggcagagtaacaaaaccaacaagagaatcaaagctggagacacagctgtccttgactgtgaggtcactggggatcccaaaccaaaaatattttggttgctgccttccaatgacatgatttccttctccattgataggtacacatttcatgccaatgggtctttgaccatcaacaaagtgaaactgctcgattctggagagtacgtatgtgtagcccgaaatcccagtggggatgacaccaaaatgtacaaactggatgtggtctctaaacctccattaatcaatggtctgtatacaaatagaactgttattaaagccacagctgtgagacattccaaaaaacactttgactgcagagctgaagggacaccatctcctgaagtcatgtggatcatgccagacaatattttcctcacagccccatactatggaagcagaatcacagtccataaaaatggaaccttggaaattaggaatgtgaggctttcagattcagccgactttatctgtgtggcccgaaatgaaggtggagagagcgtgttggtagtacagttagaagtactggaaatgctgagaagaccgacatttagaaatccatttaatgaaaaaatagttgcccagctgggaaagtccacagcattgaattgctctgttgatggtaacccaccacctgaaataatctggattttaccaaatggcacacgattttccaatggaccacaaagttatcagtatctgatagcaagcaatggttcttttatcatttctaaaacaactcgggaggatgcaggaaaatatcgctgtgcagctaggaataaagttggctatattgagaaattagtcatattagaaattggccagaagccagttattcttacctatgcaccagggacagtaaaaggcatcagtggagaatctctatcactgcattgtgtgtctgatggaatccctaagccaaatatcaaatggactatgccaagtggttatgtagtagacaggcctcaaattaatgggaaatacatattgcatgacaatggcaccttagtcattaaagaagcaacagcttatgacagaggaaactatatctgtaaggctcaaaatagtgttggtcatacactgattactgttccagtaatgattgtagcctaccctccccgaattacaaatcgtccacccaggagtattgtcaccaggacaggggcagcctttcagctccactgtgtggccttgggagttcccaagccagaaatcacgtgggagatgcctgaccactcccttctctcaacggcaagtaaagagaggacacatggaagtgagcagcttcacttacaaggtaccctagtcattcagaatccccaaacctccgattctgggatatacaaatgcacagcaaagaacccacttggtagtgattatgcagcaacgtatattcaagtaatcctcgagggc

SEQ ID NO: 714 - protein, 967 aa, Homo sapiens
TRSNSDAFLPCEAVGNPLPTIHWTRVPSGLDLSKRKQNSRVQVLPNGTLSIQRVEIQDRGQYLCSASNLFGTDHLHVTLSVVSYPPRILERRTKEITVHSGSTVELKCRAEGRPSPTVTWILANQTVVSESSQGSRQAVVTVDGTLVLHNLSIYDRGFYKCVASNPGGQDSLLVKIQVIAAPPVILEQRRQVIVGTWGESLKLPCTAKGTPQPSVYWVLSDGTEVKPLQFTNSKLFLFSNGTLYIRNLASSDRGTYECIATSSTGSERRVVMLTMEERVTSPRIEAASQKRTEVNFGDKLLLNCSATGEPKPQIMWRLPSKAVVDQQHRVGSWIHVYPNGSLFIGSVTEKDSGVYLCVARNKMGDDLILMHVSLRLKPAKIDHKQYFRKQVLHGKDFQVDCKASGSPVPEISWSLPDGTMINNAMQADDSGHRTRRYTLFNNGTLYFNKVGVAEEGDYTCYAQNTLGKDEMKVHLTVITAAPRIRQSNKTNKRIKAGDTAVLDCEVTGDPKPKIFWLLPSNDMISFSIDRYTFHANGSLTINKVKLLDSGEYVCVARNPSGDDTKMYKLDVVSKPPLINGLYTNRTVIKATAVRHSKKHFDCRAEGTPSPEVMWIMPDNIFLTAPYYGSRITVHKNGTLEIRNVRLSDSADFICVARNEGGESVLVVQLEVLEMLRRPTFRNPFNEKIVAQLGKSTALNCSVDGNPPPEIIWILPNGTRFSNGPQSYQYLIASNGSFIISKTTREDAGKYRCAARNKVGYIEKLVILEIGQKPVILTYAPGTVKGISGESLSLHCVSDGIPKPNIKWTMPSGYVVDRPQINGKYILHDNGTLVIKEATAYDRGNYICKAQNSVGHTLITVPVMIVAYPPRITNRPPRSIVTRTGAAFQLHCVALGVPKPEITWEMPDHSLLSTASKERTHGSEQLHLQGTLVIQNPQTSDSGIYKCTAKNPLGSDYAATYIQVILEG

SEQ ID NO: 715 - DNA, 7831 bp, Homo sapiens
  CDS (6)..(7811)
tcaggatgaaggtaaaaggcagaggaatcacctgcttgctggtctcctttgctgtgatctgcctggtcgccacccctgggggcaaggcctgtcctcgccgctgtgcctgttatatgcctacggaggtacactgcacatttcggtacctgacttccatcccagacagcatcccgcccaatgtggaacgcatcaatttagggtacaacagcttggttagattgatggaaacagatttttctggcctgaccaaactggagttactcatgcttcacagcaatggcattcacacaatccctgacaagaccttctcagatttgcaggccttgcaggtgagactgatggtcttaaaaatgagctataataaagtccgaaaacttcagaaagatactttttatggcctcaggagcttgacacgattgcacatggaccacaacaatattgagtttataaacccagaggttttttatgggctcaactttctccgcctggtgcacttggaaggaaatcagctcactaagctccacccagatacatttgtctctttgagctacctccagatatttaaaatctctttcattaagttcctatacttgtctgataacttcctgacctccctccctcaagagatggtctcctatatgcctgacctagacagcctttacctgcatggaaacccatggacctgtgattgccatttaaagtggttgtctgactggatacaggagaagccaggtatctatattgttttaccagatgtaataaaatgcaaaaaagatagaagtccctctagtgctcagcagtgtccactttgcatgaaccctaggacttctaaaggcaagccgttagctatggtctcagctgcagctttccagtgtgccaagccaaccattgactcatccctgaaatcaaagagcctgactattctggaagacagtagttctgctttcatctctccccaaggtttcatggcaccctttggctccctcactttgaatatgacagatcagtctggaaatgaagctaacatggtctgcagtattcaaaagccctcaaggacatcacccattgcattcactgaagaaaatgactacatcgtgctaaatacttcattttcaacatttttggtgtgcaacatagattacggtcacattcagccagtgtggcaaattttggctttgtacagtgattctcctctgatactagaaaggagccacttgcttagtgaaacaccgcagctctattacaaatataaacaggtggctcctaagcctgaagacatttttaccaacatagaggcagatctcagagcagatccctcttggttaatgcaagaccaaatttccttgcagctgaacagaactgccaccacattcagtacattacagatccagtactccagtgatgctcaaatcactttaccaagagcagagatgaggccagtgaaacacaaatggactatgatttcaagggataacaatactaagctggaacatactgtcttggtaggtggaaccgttggcctgaactgcccaggccaaggagaccccaccccacacgtggattggcttctagctgatggaagtaaagtgagagccccttatgtcagtgaggatggacggatcctaatagacaaaagtggaaaattggaactccagatggctgatagttttgacacaggcgtatatcactgtataagcagcaattatgatgatgcagatattctcacctataggataactgtggtagaacctttggtcgaagcctatcaggaaaatgggattcatcacacagttttcattggtgaaacacttgatcttccatgccattctactggtatcccagatgcctctattagctgggttattccaggaaacaatgtgctctatcagtcatcaagagacaagaaagttctaaacaatggcacattaagaatattacaggtcaccccgaaagaccaaggttattatcgctgtgtggcagccaacccatcaggggttgattttttgattttccaagtttcagtcaagatgaaaggacaaaggcccttggagcatgatggagaaacagagggatctggacttgatgagtccaatcctattgctcatcttaaggagccaccaggtgcacaactccgtacatctgctctgatggaggctgaggttggaaaacacacctcaagcacaagtaagaggcacaactatcgggaattaacactccagcgacgtggagattcaacacatcgacgttttagggagaataggaggcatttccctccctctgctaggagaattgacccacaacattgggcggcactgttggagaaagctaaaaagaatgctatgccagacaagcgagaaaataccacagtgagcccacccccagtggtcacccaactcccaaacatacctggtgaagaagacgattcctcaggcatgctcgctctacatgaggaatttatggtcccggccactaaagctttgaaccttccagcaaggacagtgactgctgactccagaacaatatctgatagtcctatgacaaacataaattatggcacagaattctctcctgttgtgaattcacaaatactaccacctgaagaacccacagatttcaaactgtctactgctattaaaactacagccatgtcaaagaatataaacccaaccatgtcaagccaaatacaaggcacaaccaatcaacattcatccactgtctttccactgctacttggagcaactgaatttcaggactctgaccagatgggaagaggaagagagcatttccaaagtagacccccaataacagtaaggactatgatcaaagatgtcaatgtcaaaatgcttagtagcaccaccaacaaactattattagagtcagtaaataccacaaatagtcatcagacatctgtaagagaagtgagtgaacccaggcacaatcacttctattctcacactactcaaatacttagcacctccacgttcccttcagatccacacacagctgctcattctcagtttccgatccctagaaatagtacagttaacatcccgctgttcagacgctttgggaggcagaggaaaattggcggaagggggcggattatcagcccatatagaactccagttctgcgacggcatagatacagcattttcaggtcaacaaccagaggttcttctgaaaaaagcactactgcattctcagccacagtgctcaatgtgacatgtctgtcctgtcttcccagggagaggctcaccactgccacagcagcattgtcttttccaagtgctgctcccatcaccttccccaaagctgacattgctagagtcccatcagaagagtctacaactctagtccagaatccactattactacttgagaacaaacccagtgtagagaaaacaacacccacaataaaatatttcaggactgaaatttcccaagtgactccaactggtgcagtcatgacatatgctccaacatccatacccatggaaaaaactcacaaagtaaacgccagttacccacgtgtgtctagcaccaatgaagctaaaagagattcagtgattacatcgtcactttcaggtgctatcaccaagccaccaatgactattatagccattacaaggttttcaagaaggaaaattccctggcaacagaactttgtaaataaccataacccaaaaggcagattaaggaatcaacataaagttagtttacaaaaaagcacagctgtgatgcttcctaaaacatctcctgctttaccacagagacaaagtctcccctcgcaccacactacgaccaaaacacacaatcctggaagtcttccaacaaagaaggagcttcccttcccaccccttaaccctatgcttcctagtattataagcaaagactcaagtacaaaaagcatcatatcaacgcaaacagcaataccagcaacaactcctaccttccctgcatctgtcatcacttatgaaacccaaacagagagatctagagcacaaacaatacaaagagaacaggagcctcaaaagaagaacaggactgacccaaacatctctccagaccagagttctggcttcactacacccactgctatgacacctcctgttctaaccacagccgaaacttcagtcaagcccagtgtctctgcattcactcattccccaccagaaaacacaactgggatttcaagcacaatcagttttcattcaagaactcttaatctgacagatgtgattgaagaactagcccaagcaagtactcagactttgaagagcacaattgcttctgaaacaactttgtccagcaaatcacaccagagtaccacaactaggaaagcaatcattagacactcaaccataccaccattcttgagcagcagtgctactctaatgccagttcccatctcccctccctttactcagagagcagttactgacaacgtggcgactcccatttccgggcttatgacaaatacagtggtcaagctgcacgaatcctcaaggcacaatgctaaaccacagcaattagtagcagaggttgcaacatcccccaaggttcacccaaatgccaagttcacaattggaaccactcacttcatctactctaatctgttacattctactcccatgccagcactaacaacagttaaatcacagaattctaaattaactccatctccctgggcagaaaaccaattttggcacaaaccatactcagaaattgctgaaaaaggcaaaaagccagaagtaagcatgttggctactacaggcctgtccgaggccaccactcttgtttcagattgggatggacagaagaacacaaagaagagtgactttgataagaaaccagttcaagaagcaacaacttccaaactccttccctttgactctttgtctaggtatatatttgaaaagcccaggatagttggaggaaaagctgcaagttttactattccagctaactcagatgcctttcttccctgtgaagctgttggaaatcccctgcccaccattcattggaccagagtcccatcaggtatgtcaggacttgatttatctaagaggaaacagaatagcagggtccaggttctccccaatggtaccctgtccatccagagggtggaaattcaggaccgcggacagtacttgtgttccgcatccaatctgtttggcacagaccaccttcatgtcaccttgtctgtggtttcctatcctcccaggatcctggagagacgtaccaaagagatcacagttcattccggaagcactgtggaactgaagtgcagagcagaaggtaggccaagccctacagttacctggattcttgcaaaccaaacagttgtctcagaatcatcccagggaagtaggcaggctgtggtgacggttgacggaacattggtcctccacaatctcagtatttatgaccgtggcttttacaaatgtgtggccagcaacccaggtggccaggattcactgctggttaaaatacaagtcattgcagcaccacctgttattctagagcaaaggaggcaagtcattgtaggcacttggggtgaaagtttaaaactgccctgtactgcaaaaggaactcctcagcccagcgtttactgggtcctctctgatggcactgaagtgaaaccattacagtttaccaattccaagttgttcttattttcaaatgggactttgtatataagaaacctagcctcttcagacaggggcacttatgaatgcattgctaccagttccactggttcggagcgaagagtagtaatgcttacaatggaagagcgagtgaccagccccaggatagaagctgcatcccagaaaaggactgaagtgaattttggggacaaattactactgaactgctcagccactggggagcccaaaccccaaataatgtggaggttaccatccaaggctgtggtcgaccagcagcatagggtgggcagctggatccacgtctaccctaatggatccctgtttattggatcagtaacagaaaaagacagtggtgtctacttgtgtgtggcaagaaacaaaatgggggatgatctgatactgatgcatgttagcctaagactgaaacctgccaaaattgaccacaagcagtattttagaaagcaagtgctccatgggaaagatttccaagtagattgcaaagcttccggctccccagtgccagagatatcttggagtttgcctgatggaaccatgatcaacaatgcaatgcaagccgatgacagtggccacaggactaggagatatacccttttcaacaatggaactttatacttcaacaaagttggggtagcggaggaaggagattatacttgctatgcccagaacaccctagggaaagatgaaatgaaggtccacttaacagttataacagctgctccccggataaggcagagtaacaaaaccaacaagagaatcaaagctggagacacagctgtccttgaccgtgaggtcactggggatcccaaaccaaaaatattttggttgctgccttccaatgggtctttgaccatcaacaaagtgaaactgctcgattctggagagtacgtatgtgtagcccgaaatcccagtggggatgacaccaaaatgtacaaactggatgtggtctctaaacctccattaatcaatggtctgtatacaaatagaactgttattaaagccacagctgtgagacattccaaaaaacactttgactgcagagctgaagggacaccatctcctgaagtcatgtggatcatgccagacaatattttcctcacagccccatactatggaagcagaatcacagtccataaaaatggaaccttggaaattaggaatgtgaggctttcagattcagccgactttatctgtgtggcccgaaatgaaggtggagagagcgtgttggtagtacagttagaagtactggaaatgctgagaagaccgacatttagaaatccatttaatgaaaaaatagttgcccagctgggaaagtccacagcattgaattgctctgttgatggtaacccaccacctgaaataatctggattttaccaaatggcacacgattttccaatggaccacaaagttatcagtatctgatagcaagcaatggttcttttatcatttctaaaacaactcgggaggatgcaggaaaatatcgctgtgcagctaggaataaagttggctatattgagaaattagtcatattagaaattggccagaagccagttattcttacctatgcaccagggacagtaaaaggcatcagtggagaatctctatcactgcattgtgtgtctgatggaatccctaagccaaatatcaaatggactatgccaagtggttatgtagtagacaggcctcaaattaatgggaaatacatattgcatgacaatggcaccttagtcattaaagaagcaacagcttatgacagaggaaactatatctgtaaggctcaaaatagtgttggtcatacactgattactgttccagtaatgattgtagcctaccctccccgaattacaaatcgtccacccaggagtattgtcaccaggacaggggcagcctttcagctccactgtgtggccttgggagttcccaagccagaaatcacatgggagatgcctgaccactcccttctctcaacggcaagtaaagagaggacacatggaagtgagcagcttcacttacaaggtaccctagtcattcagaatccccaaacctccgattctgggatatacaaatgcacagcaaagaacccacttggtagtgattatgcagcaacgtatattcaagtaatctgacatgaaataataaagtc

SEQ ID NO: 716 - protein, 2602 aa, Homo sapiens
MKVKGRGITCLLVSFAVICLVATPGGKACPRRCACYMPTEVHCTFRYLTSIPDSIPPNVERINLGYNSLVRLMETDFSGLTKLELLMLHSNGIHTIPDKTFSDLQALQVRLMVLKMSYNKVRKLQKDTFYGLRSLTRLHMDHNNIEFINPEVFYGLNFLRLVHLEGNQLTKLHPDTFVSLSYLQIFKISFIKFLYLSDNFLTSLPQEMVSYMPDLDSLYLHGNPWTCDCHLKWLSDWIQEKPGIYIVLPDVIKCKKDRSPSSAQQCPLCMNPRTSKGKPLAMVSAAAFQCAKPTIDSSLKSKSLTILEDSSSAFISPQGFMAPFGSLTLNMTDQSGNEANMVCSIQKPSRTSPIAFTEENDYIVLNTSFSTFLVCNIDYGHIQPVWQILALYSDSPLILERSHLLSETPQLYYKYKQVAPKPEDIFTNIEADLRADPSWLMQDQISLQLNRTATTFSTLQIQYSSDAQITLPRAEMRPVKHKWTMISRDNNTKLEHTVLVGGTVGLNCPGQGDPTPHVDWLLADGSKVRAPYVSEDGRILIDKSGKLELQMADSFDTGVYHCISSNYDDADILTYRITVVEPLVEAYQENGIHHTVFIGETLDLPCHSTGIPDASISWVIPGNNVLYQSSRDKKVLNNGTLRILQVTPKDQGYYRCVAANPSGVDFLIFQVSVKMKGQRPLEHDGETEGSGLDESNPIAHLKEPPGAQLRTSALMEAEVGKHTSSTSKRHNYRELTLQRRGDSTHRRFRENRRHFPPSARRIDPQHWAALLEKAKKNAMPDKRENTTVSPPPVVTQLPNIPGEEDDSSGMLALHEEFMVPATKALNLPARTVTADSRTISDSPMTNINYGTEFSPVVNSQILPPEEPTDFKLSTAIKTTAMSKNINPTMSSQIQGTTNQHSSTVFPLLLGATEFQDSDQMGRGREHFQSRPPITVRTMIKDVNVKMLSSTTNKLLLESVNTTNSHQTSVREVSEPRHNHFYSHTTQILSTSTFPSDPHTAAHSQFPIPRNSTVNIPLFRRFGRQRKIGGRGRIISPYRTPVLRRHRYSIFRSTTRGSSEKSTTAFSATVLNVTCLSCLPRERLTTATAALSFPSAAPITFPKADIARVPSEESTTLVQNPLLLLENKPSVEKTTPTIKYFRTEISQVTPTGAVMTYAPTSIPMEKTHKVNASYPRVSSTNEAKRDSVITSSLSGAITKPPMTIIAITRFSRRKIPWQQNFVNNHNPKGRLRNQHKVSLQKSTAVMLPKTSPALPQRQSLPSHHTTTKTHNPGSLPTKKELPFPPLNPMLPSIISKDSSTKSIISTQTAIPATTPTFPASVITYETQTERSRAQTIQREQEPQKKNRTDPNISPDQSSGFTTPTAMTPPVLTTAETSVKPSVSAFTHSPPENTTGISSTISFHSRTLNLTDVIEELAQASTQTLKSTIASETTLSSKSHQSTTTRKAIIRHSTIPPFLSSSATLMPVPISPPFTQRAVTDNVATPISGLMTNTVVKLHESSRHNAKPQQLVAEVATSPKVHPNAKFTIGTTHFIYSNLLHSTPMPALTTVKSQNSKLTPSPWAENQFWHKPYSEIAEKGKKPEVSMLATTGLSEATTLVSDWDGQKNTKKSDFDKKPVQEATTSKLLPFDSLSRYIFEKPRIVGGKAASFTIPANSDAFLPCEAVGNPLPTIHWTRVPSGMSGLDLSKRKQNSRVQVLPNGTLSIQRVEIQDRGQYLCSASNLFGTDHLHVTLSVVSYPPRILERRTKEITVHSGSTVELKCRAEGRPSPTVTWILANQTVVSESSQGSRQAVVTVDGTLVLHNLSIYDRGFYKCVASNPGGQDSLLVKIQVIAAPPVILEQRRQVIVGTWGESLKLPCTAKGTPQPSVYWVLSDGTEVKPLQFTNSKLFLFSNGTLYIRNLASSDRGTYECIATSSTGSERRVVMLTMEERVTSPRIEAASQKRTEVNFGDKLLLNCSATGEPKPQIMWRLPSKAVVDQQHRVGSWIHVYPNGSLFIGSVTEKDSGVYLCVARNKMGDDLILMHVSLRLKPAKIDHKQYFRKQVLHGKDFQVDCKASGSPVPEISWSLPDGTMINNAMQADDSGHRTRRYTLFNNGTLYFNKVGVAEEGDYTCYAQNTLGKDEMKVHLTVITAAPRIRQSNKTNKRIKAGDTAVLDREVTGDPKPKIFWLLPSNGSLTINKVKLLDSGEYVCVARNPSGDDTKMYKLDVVSKPPLINGLYTNRTVIKATAVRHSKKHFDCRAEGTPSPEVMWIMPDNIFLTAPYYGSRITVHKNGTLEIRNVRLSDSADFICVARNEGGESVLVVQLEVLEMLRRPTFRNPFNEKIVAQLGKSTALNCSVDGNPPPEIIWILPNGTRFSNGPQSYQYLIASNGSFIISKTTREDAGKYRCAARNKVGYIEKLVILEIGQKPVILTYAPGTVKGISGESLSLHCVSDGIPKPNIKWTMPSGYVVDRPQINGKYILHDNGTLVIKEATAYDRGNYICKAQNSVGHTLITVPVMIVAYPPRITNRPPRSIVTRTGAAFQLHCVALGVPKPEITWEMPDHSLLSTASKERTHGSEQLHLQGTLVIQNPQTSDSGIYKCTAKNPLGSDYAATYIQVI

SEQ ID NO: 717 - DNA, 8270 bp, Homo sapiens
  CDS (6)..(7778)
  misc_feature (746)..(746): Wherein n may be a, c, g or t
tcaggatgaaggtaaaaggcagaggaatcacctgcttgctggtctcctttgctgtgatctgcctggtcgccacccctgggggcaaggcctgtcctcgccgctgtgcctgttatatgcctacggaggtacactgcacatttcggtacctgacttccatcccagacagcatcccgcccaatgtggaacgcatcaatttagggtacaacagcttggttagattgatggaaacagatttttctggcctgaccaaactggagttactcatgcttcacagcaatggcattcacacaatccctgacaagaccttctcagatttgcaggccttgcaggtgagactgatggtcttaaaaatgagctataataaagtccgaaaacttcagaaagatactttttatggcctcaggagcttgacacgattgcacatggaccacaacaatattgagtttataaacccagaggttttttatgggctcaactttctccgcctggtgcacttggaaggaaatcagctcactaagctccacccagatacatttgtctctttgagctacctccagatatttaaaatctctttcattaagttcctatacttgtctgataacttcctgacctccctccctcaagagatggtctcctatatgcctgacctagacagcctttacctgcatggaaacccatggacctgtgattgccatttaaagtggttgtctgactggatacaggagaagccaggtatctatattgtnttaccagatgtaataaaatgcaaaaaagatagaagtccctctagtgctcagcagtgtccactttgcatgaaccctaggacttctaaaggcaagccgttagctatggtctcagctgcagctttccagtgtgccaagccaaccattgactcatccctgaaatcaaagagcctgactattctggaagacagtagttctgctttcatctctccccaaggtttcatggcaccctttggctccctcactttgaatatgacagatcagtctggaaatgaagctaacatggtctgcagtattcaaaagccctcaaggacatcacccattgcattcactgaagaaaatgactacatcgtgctaaatacttcattttcaacatttttggtgtgcaacatagattacggtcacattcagccagtgtggcaaattttggctttgtacagtgattctcctctgatactagaaaggagccacttgcttagtgaaacaccgcagctctattacaaatataaacaggtggctcctaagcctgaagacatttttaccaacatagaggcagatctcagagcagatccctcttggttaatgcaagaccaaatttccttgcagctgaacagaactgccaccacattcagtacattacagatccagtactccagtgatgctcaaatcactttaccaagagcagagatgaggccagtgaaacacaaatggactatgatttcaagggataacaatactaagctggaacatactgtcttggtaggtggaaccgttggcctgaactgcccaggccaaggagaccccaccccacacgtggattggcttctagctgatggaagtaaagtgagagccccttatgtcagtgaggatggacggatcctaatagacaaaagtggaaaattggaactccagatggctgatagttttgacacaggcgtatatcactgtataagcagcaattatgatgatgcagatattctcacctataggataactgtggtagaacctttggtcgaagcctatcaggaaaatgggattcatcacacagttttcattggtgaaacacttgatcttccatgccattctactggtatcccagatgcctctattagctgggttattccaggaaacaatgtgctctatcagtcatcaagagacaagaaagttctaaacaatggcacattaagaatattacaggtcaccccgaaagaccaaggttattatcgctgtgtggcagccaacccatcaggggttgattttttgattttccaagtttcagtcaagatgaaaggacaaaggcccttggagcatgatggagaaacagagggatctggacttgatgagtccaatcctattgctcatcttaaggagccaccaggtgcacaactccgtacatctgctctgatggaggctgaggttggaaaacacacctcaagcacaagtaagaggcacaactatcgggaattaacactccagcgacgtggagattcaacacatcgacgttttagggagaataggaggcatttccctccctctgctaggagaattgacccacaacattgggcggcactgttggagaaagctaaaaagaatgctatgccagacaagcgagaaaataccacagtgagcccacccccagtggtcacccaactcccaaacatacctggtgaagaagacgattcctcaggcatgctcgctctacatgaggaatttatggtcccggccactaaagctttgaaccttccagcaaggacagtgactgctgactccagaacaatatctgatagtcctatgacaaacataaattatggcacagaattctctcctgttgtgaattcacaaatactaccacctgaagaacccacagatttcaaactgtctactgctattaaaactacagccatgtcaaagaatataaacccaaccatgtcaagccaaatacaaggcacaaccaatcaacattcatccactgtctttccactgctacttggagcaactgaatttcaggactctgaccagatgggaagaggaagagagcatttccaaagtagacccccaataacagtaaggactatgatcaaagatgtcaatgtcaaaatgcttagtagcaccaccaacaaactattattagagtcagtaaataccacaaatagtcatcagacatctgtaagagaagtgagtgaacccaggcacaatcacttctattctcacactactcaaatacttagcacctccacgttcccttcagatccacacacagctgctcattctcagtttccgatccctagaaatagtacagttaacatcccgctgttcagacgctttgggaggcagaggaaaattggcggaagggggcggattatcagcccatatagaactccagttctgcgacggcatagatacagcattttcaggtcaacaaccagaggttcttctgaaaaaagcactactgcattctcagccacagtgctcaatgtgacatgtctgtcctgtcttcccagggagaggctcaccactgccacagcagcattgtcttttccaagtgctgctcccatcaccttccccaaagctgacattgctagagtcccatcagaagagtctacaactctagtccagaatccactattactacttgagaacaaacccagtgtagagaaaacaacacccacaataaaatatttcaggactgaaatttcccaagtgactccaactggtgcagtcatgacatatgctccaacatccatacccatggaaaaaactcacaaagtaaacgccagttacccacgtgtgtctagcaccaatgaagctaaaagagattcagtgattacatcgtcactttcaggtgctatcaccaagccaccaatgactattatagccattacaaggttttcaagaaggaaaattccctggcaacagaactttgtaaataaccataacccaaaaggcagattaaggaatcaacataaagttagtttacaaaaaagcacagctgtgatgcttcctaaaacatctcctgctttaccacagagacaaagtctcccctcgcaccacactacgaccaaaacacacaatcctggaagtcttccaacaaagaaggagcttcccttcccaccccttaaccctatgcttcctagtattataagcaaagactcaagtacaaaaagcatcatatcaacgcaaacagcaataccagcaacaactcctaccttccctgcatctgtcatcacttatgaaacccaaacagagagatctagagcacaaacaatacaaagagaacaggagcctcaaaagaagaacaggactgacccaaacatctctccagaccagagttctggcttcactacacccactgctatgacacctcctgttctaaccacagccgaaacttcagtcaagcccagtgtctctgcattcactcattccccaccagaaaacacaactgggatttcaagcacaatcagttttcattcaagaactcttaatctgacagatgtgattgaagaactagcccaagcaagtactcagactttgaagagcacaattgcttctgaaacaactttgtccagcaaatcacaccagagtaccacaactaggaaagcaatcattagacactcaaccataccaccattcttgagcagcagtgctactctaatgccagttcccatctcccctccctttactcagagagcagttactgacaacgtggcgactcccatttccgggcttatgacaaatacagtggtcaagctgcacgaatcctcaaggcacaatgctaaaccacagcaattagtagcagaggttgcaacatcccccaaggttcacccaaatgccaagttcacaattggaaccactcacttcatctactctaatctgttacattctactcccatgccagcactaacaacagttaaatcacagaattctaaattaactccatctccctgggcagaaaaccaattttggcacaaaccatactcagaaattgctgaaaaaggcaaaaagccagaagtaagcatgttggctactacaggcctgtccgaggccaccactcttgtttcagattgggatggacagaagaacacaaagaagagtgactttgataagaaaccagttcaagaagcaacaacttccaaactccttccctttgactctttgtctaggtatatatttgaaaagcccaggatagttggaggaaaagctgcaagttttactattccagctaactcagatgcctttcttccctgtgaagctgttggaaatcccctgcccaccattcattggaccagagtcccatcaggtatgtcaggacttgatttatctaagaggaaacagaatagcagggtccaggttctccccaatggtaccctgtccatccagagggtggaaattcaggaccgcggacagtacttgtgttccgcatccaatctgtttggcacagaccaccttcatgtcaccttgtctgtggtttcctatcctcccaggatcctggagagacgtaccaaagagatcacagttcattccggaagcactgtggaactgaagtgcagagcagaaggtaggccaagccctacagttacctggattcttgcaaaccaaacagttgtctcagaatcatcccagggaagtaggcaggctgtggtgacggttgacggaacattggtcctccacaatctcagtatttatgaccgtggcttttacaaatgtgtggccagcaacccaggtggccaggattcactgctggttaaaatacaagtcattgcagcaccacctgttattctagagcaaaggaggcaagtcattgtaggcacttggggtgaaagtttaaaactgccctgtactgcaaaaggaactcctcagcccagcgtttactgggtcctctctgatggcactgaagtgaaaccattacagtttaccaattccaagttgttcttattttcaaatgggactttgtatataagaaacctagcctcttcagacaggggcacttatgaatgcattgctaccagttccactggttcggagcgaagagtagtaatgcttacaatggaagagcgagtgaccagccccaggatagaagctgcatcccagaaaaggactgaagtgaattttggggacaaattactactgaactgctcagccactggggagcccaaaccccaaataatgtggaggttaccatccaaggctgtggtcgaccagcagcatagagtgggcagctggatccacgtctaccctaatggatccctgtttattggatcagtaacagaaaaagacagtggtgtctacttgtgtgtggcaagaaacaaaatgggggatgatctgatactgatgcatgttagcctagaactgaaacctgccaaaattgaccacaagcagtattttagaaagcaagtgctccatgggaaagatttccaagtagattgcaaagcttccggctccccagtgccagagatatcttggagtttgcctgatggaaccatgatcaacaatgcaatgcaagccgatgacagtggccacaggactaggagatatacccttttcaacaatggaactttatacttcaacaaagttggggtagcggaggaaggagattatacttgctatgcccagaacaccctagggaaagatgaaatgaaggtccacttaacagttataacagctgctccccggataaggcagagtaacaaaaccaacaagagaatcaaagctggagacacagctgtccttgactgtgaggtcattcatgccaatgggtctttgaccatcaacaaagtgaaactgctcgattctggagagtacgtatgtgtagcccgaaatcccagtggggatgacaccaaaatgtacaaactggatgtggtctctaaacctccattaatcaatggtctgtatacaaatagaactgttattaaagccacagctgtgagacattccaaaaaacactttgactgcagagctgaagggacaccatctcctgaagtcatgtggatcatgccagacaatattttcctcacagccccatactatggaagcagaatcacagtccataaaaatggaaccttggaaattaggaatgtgaggctttcagattcagccgactttatctgtgtggcccgaaatgaaggtggagagagcgtgttggtagtacagttagaagtactggaaatgctgagaagaccgacatttagaaatccatttaatgaaaaaatagttgcccagctgggaaagtccacagcattgaattgctctgttgatggtaacccaccacctgaaataatctggattttaccaaatggcacacgattttccaatggaccacaaagttatcagtatctgatagcaagcaatggttcttttatcatttctaaaacaactcgggaggatgcaggaaaatatcgctgtgcagctaggaataaagttggctatattgagaaattagtcatattagaaattggccagaagccagttattcttacctatgcaccagggacagtaaaaggcatcagtggagaatctctatcactgcattgtgtgtctgatggaatccctaagccaaatatcaaatggactatgccaagtggttatgtagtagacaggcctcaaattaatgggaaatacatattgcatgacaatggcaccttagtcattaaagaagcaacagcttatgacagaggaaactatatctgtaaggctcaaaatagtgttggtcatacactgattactgttccagtaatgattgtagcctaccctccccgaattacaaatcgtccacccaggagtattgtcaccaggacaggggcagcctttcagctccactgtgtggccttgggagttcccaagccagaaatcacgtgggagatgcctgaccactcccttctctcaacggcaagtaaagagaggacacatggaagtgagcagcttcacttacaaggtaccctagtcattcagaatccccaaacctccgattctgggatatacaaatgcacagcaaagaacccacttggtagtgattatgcagcaacgtatattcaagtaatctgacatgaaataataaagtcaacaacatctgggcagaatttattttttggaagaagtttaatcaaaggcagccataggcatgtaaatgaatttgaatacatttacagtattaaatttacaatgaacatgcaaaataaaaggacttgtaaataaatgcattatgaactgatgatactgatttatttaatggatctcaaaacaaacttttaacttaaggcacttttattttgccaacaaataacaataaacaaacattgaaacggttcactataaaataacaaatggctaatgtacctgaatttttcagtaaaaaaatgaacttctaataccagttgcctagtgtccacctcctatcaatgttacaagcatggcactcagaacagagacaatggaaaatattaaatctgcaatctttatgatgtaaatttaccatcctgatgtataaatattttgtggtttataaatttttttgctaaaacctacagaaaaaaa

SEQ ID NO: 718 - protein, 2591 aa, Homo sapiens
MKVKGRGITCLLVSFAVICLVATPGGKACPRRCACYMPTEVHCTFRYLTSIPDSIPPNVERINLGYNSLVRLMETDFSGLTKLELLMLHSNGIHTIPDKTFSDLQALQVRLMVLKMSYNKVRKLQKDTFYGLRSLTRLHMDHNNIEFINPEVFYGLNFLRLVHLEGNQLTKLHPDTFVSLSYLQIFKISFIKFLYLSDNFLTSLPQEMVSYMPDLDSLYLHGNPWTCDCHLKWLSDWIQEKPGIYIVLPDVIKCKKDRSPSSAQQCPLCMNPRTSKGKPLAMVSAAAFQCAKPTIDSSLKSKSLTILEDSSSAFISPQGFMAPFGSLTLNMTDQSGNEANMVCSIQKPSRTSPIAFTEENDYIVLNTSFSTFLVCNIDYGHIQPVWQILALYSDSPLILERSHLLSETPQLYYKYKQVAPKPEDIFTNIEADLRADPSWLMQDQISLQLNRTATTFSTLQIQYSSDAQITLPRAEMRPVKHKWTMISRDNNTKLEHTVLVGGTVGLNCPGQGDPTPHVDWLLADGSKVRAPYVSEDGRILIDKSGKLELQMADSFDTGVYHCISSNYDDADILTYRITVVEPLVEAYQENGIHHTVFIGETLDLPCHSTGIPDASISWVIPGNNVLYQSSRDKKVLNNGTLRILQVTPKDQGYYRCVAANPSGVDFLIFQVSVKMKGQRPLEHDGETEGSGLDESNPIAHLKEPPGAQLRTSALMEAEVGKHTSSTSKRHNYRELTLQRRGDSTHRRFRENRRHFPPSARRIDPQHWAALLEKAKKNAMPDKRENTTVSPPPVVTQLPNIPGEEDDSSGMLALHEEFMVPATKALNLPARTVTADSRTISDSPMTNINYGTEFSPVVNSQILPPEEPTDFKLSTAIKTTAMSKNINPTMSSQIQGTTNQHSSTVFPLLLGATEFQDSDQMGRGREHFQSRPPITVRTMIKDVNVKMLSSTTNKLLLESVNTTNSHQTSVREVSEPRHNHFYSHTTQILSTSTFPSDPHTAAHSQFPIPRNSTVNIPLFRRFGRQRKIGGRGRIISPYRTPVLRRHRYSIFRSTTRGSSEKSTTAFSATVLNVTCLSCLPRERLTTATAALSFPSAAPITFPKADIARVPSEESTTLVQNPLLLLENKPSVEKTTPTIKYFRTEISQVTPTGAVMTYAPTSIPMEKTHKVNASYPRVSSTNEAKRDSVITSSLSGAITKPPMTIIAITRFSRRKIPWQQNFVNNHNPKGRLRNQHKVSLQKSTAVMLPKTSPALPQRQSLPSHHTTTKTHNPGSLPTKKELPFPPLNPMLPSIISKDSSTKSIISTQTAIPATTPTFPASVITYETQTERSRAQTIQREQEPQKKNRTDPNISPDQSSGFTTPTAMTPPVLTTAETSVKPSVSAFTHSPPENTTGISSTISFHSRTLNLTDVIEELAQASTQTLKSTIASETTLSSKSHQSTTTRKAIIRHSTIPPFLSSSATLMPVPISPPFTQRAVTDNVATPISGLMTNTVVKLHESSRHNAKPQQLVAEVATSPKVHPNAKFTIGTTHFIYSNLLHSTPMPALTTVKSQNSKLTPSPWAENQFWHKPYSEIAEKGKKPEVSMLATTGLSEATTLVSDWDGQKNTKKSDFDKKPVQEATTSKLLPFDSLSRYIFEKPRIVGGKAASFTIPANSDAFLPCEAVGNPLPTIHWTRVPSGMSGLDLSKRKQNSRVQVLPNGTLSIQRVEIQDRGQYLCSASNLFGTDHLHVTLSVVSYPPRILERRTKEITVHSGSTVELKCRAEGRPSPTVTWILANQTVVSESSQGSRQAVVTVDGTLVLHNLSIYDRGFYKCVASNPGGQDSLLVKIQVIAAPPVILEQRRQVIVGTWGESLKLPCTAKGTPQPSVYWVLSDGTEVKPLQFTNSKLFLFSNGTLYIRNLASSDRGTYECIATSSTGSERRVVMLTMEERVTSPRIEAASQKRTEVNFGDKLLLNCSATGEPKPQIMWRLPSKAVVDQQHRVGSWIHVYPNGSLFIGSVTEKDSGVYLCVARNKMGDDLILMHVSLELKPAKIDHKQYFRKQVLHGKDFQVDCKASGSPVPEISWSLPDGTMINNAMQADDSGHRTRRYTLFNNGTLYFNKVGVAEEGDYTCYAQNTLGKDEMKVHLTVITAAPRIRQSNKTNKRIKAGDTAVLDCEVIHANGSLTINKVKLLDSGEYVCVARNPSGDDTKMYKLDVVSKPPLINGLYTNRTVIKATAVRHSKKHFDCRAEGTPSPEVMWIMPDNIFLTAPYYGSRITVHKNGTLEIRNVRLSDSADFICVARNEGGESVLVVQLEVLEMLRRPTFRNPFNEKIVAQLGKSTALNCSVDGNPPPEIIWILPNGTRFSNGPQSYQYLIASNGSFIISKTTREDAGKYRCAARNKVGYIEKLVILEIGQKPVILTYAPGTVKGISGESLSLHCVSDGIPKPNIKWTMPSGYVVDRPQINGKYILHDNGTLVIKEATAYDRGNYICKAQNSVGHTLITVPVMIVAYPPRITNRPPRSIVTRTGAAFQLHCVALGVPKPEITWEMPDHSLLSTASKERTHGSEQLHLQGTLVIQNPQTSDSGIYKCTAKNPLGSDYAATYIQVI

SEQ ID NO: 719 - DNA, 771 bp, Homo sapiens
  CDS (7)..(765)
aagcttgcctgtcctcgccgctgtgcctgttatatgcctacggaggtacactgcacatttcggtacctgacttccatcccagacagcatcccgcccaatgtggaacgcatcaatttaggatacaacagcttggttagattgatggaaacagatttttctggcctgaccaaactggagttactcatgcttcacagcaatggcattcacacaatccctgacaagaccttctcagatttgcaggccttgcaggtcttaaaaatgagctataacaaagtccgaaaacttcagaaagatactttttatggcctcaggagcttgacacgattgcacatggaccacaacaatattgagtttataaacccagaggtttttgatgggctcaactttctccgcctggtgcacttggaaggaaatcagctcactaagctccacccagatacatttgtctctttgagctacctccagatatttaaaatctctttcattaagttcctatacttgtctgataacttcctgacctccctccctcaagagatggtctcctatatgcctgacctagacagcctttacctgcatggaaacccatggacctgtgattgccatttaaagtggttgtctgactggatacaggagaagccagatgtaataaaatgcaaaaaagatagaagtccctctagtgctcagcagtgtccactttgcatgaaccctaggacttctaaaggcaagccgttagctatggtctcagctgcagctttccagtgtgccctcgag

SEQ ID NO: 720 - protein, 253 aa, Homo sapiens
ACPRRCACYMPTEVHCTFRYLTSIPDSIPPNVERINLGYNSLVRLMETDFSGLTKLELLMLHSNGIHTIPDKTFSDLQALQVLKMSYNKVRKLQKDTFYGLRSLTRLHMDHNNIEFINPEVFDGLNFLRLVHLEGNQLTKLHPDTFVSLSYLQIFKISFIKFLYLSDNFLTSLPQEMVSYMPDLDSLYLHGNPWTCDCHLKWLSDWIQEKPDVIKCKKDRSPSSAQQCPLCMNPRTSKGKPLAMVSAAAFQCA

SEQ ID NO: 721 - DNA, 2011 bp, Homo sapiens; identical to SEQ ID NO: 669
  CDS (32)..(1987)

SEQ ID NO: 722 - protein, 652 aa, Homo sapiens
GDKLLLNCSATGEPKPQIMWRLPSKAVVDQQHRVGSWIHVYPNGSLFIGSVTEKDSGVYLCVARNKMGDDLILMHVSLRLKPAKIDHKQYFRKQVLHGKDFQVDCKASGSPVPEISWSLPDGTMINNAMQADDSGHRTRRYTLFNNGTLYFNKVGVAEEGDYTCYAQNTLGKDEMKVHLTVITAAPRIRQSNKTNKRIKAGDTAVLDCEVTGDPKPKIFWLLPSNDMISFSIDRYTFHANGSLTINKVKLLDSGEYVCVARNPSGDDTKMYKLDVVSKPPLINGLYTNRTVIKATAVRHSKKHFDCRAEGTPSPEVMWIMPDNIFLTAPYYGSRITVHKNGTLEIRNVRLSDSADFICVARNEGGESVLVVQLEVLEMLRRPTFRNPFNEKIVAQLGKSTALNCSVDGNPPPEIIWILPNGTRFSNGPQSYQYLIASNGSFIISKTTREDAGKYRCAARNKVGYIEKLVILEIGQKPVILTYAPGTVKGISGESLSLHCVSDGIPKPNIKWTMPSGYVVDRPQINGKYILHDNGTLVIKEATAYDRGNYICKAQNSVGHTLITVPVMIVAYPPRITNRPPRSIVTRTGAAFQLHCVALGVPKPEITWEMPDHSLLSTASKERTHGSEQLHLQGTLVIQNPQTSDSGIYKCTA

SEQ ID NO: 723 - DNA, 1975 bp, Homo sapiens
  CDS (11)..(1966)
caccagatctggggacaaattactactgaactgctcagccactggggagcccaaaccccaaataatgtggaggttaccatccaaggctgtggtcgaccagcagcatagagtgggcagctggatccacgtctaccctaatggatccctgtttattggatcagtaacagaaaaagacagtggtgtctacttgtgtgtggcaagaaacaaaatgggggatgatctgatactgatgcatgttagcctaagactgaaacctgccaaaattgaccacaagcagtattttagaaagcaagtgctccatgggaaagatttccaagtagattgcaaagcttccggctccccagtgccagagatatcttggagtttgcctgatggaaccatgatcaacaatgcaatgcaagccgatgacagtggccacaggactaggagatatacccttttcaacaatggaactttatacttcaacaaagttggggtagcggaggaaggagattatacttgctatgcccagaacaccctagggaaagatgaaatgaaggtccacttaacagttataacagctgctccccggataaggcagagtaacaaaaccaacaagagaatcaaagctggagacacagctgtccttgactgtgaggtcactggggatcccaaaccaaaaatattttggttgctgccttccaatgacatgatttccttctccattgataggtacacatttcatgccaatgggtctttgaccatcaacaaagtgaaactgctcgattctggagagtacgtatgtgtagcccgaaatcccagtggggatgacaccaaaatgtacaaactggatgtggtctctaaacctccattaatcaatggtctgtatacaaacagaactgttattaaagccacagctgtgagacattccaaaaaacactttgactgcagagctgaagggacaccatctcctgaagtcatgtggatcatgccagacaatattttcctcacagccccatactatggaagcagaatcacagtccataaaaatggaaccttggaaattaggaatgtgaggctttcagattcagccgactttatctgtgtggcccgaaatgaaggtggagagagcgtgttggtagtacagttagaagtactggaaatgctgagaagaccgacatttagaaatccatttaatgaaaaaatagttgcccagctgggaaagtccacagcattgaattgctctgttgatggtaacccaccacctgaaataatctggattttaccaaatggcacacgattttccaatggaccacaaagttatcagtatctgatagcaagcaatggttcttttatcatttctaaaacaactcgggaggatgcaggaaaatatcgctgtgcagctaggaataaagttggctatattgagaaattagtcatattagaaattggccagaagccagttattcttacctatgcaccagggacagtaaaaggcatcagtggagaatctctatcactgcattgtgtgtctgatggaatccctaagccaaatatcaaatggactatgccaagtggttatgtagtagacaggcctcaaattaatgggaaatacatattgcatgacaatggcaccttagtcattaaagaagcaacagcttatgacagaggaaactatatctgtaaggctcaaaatagtgttggtcatacactgattactgttccagtaatgattgtagcctaccctccccgaattacaaatcgtccacccaggagtattgtcaccaggacaggggcagcctttcagctccactgtgtggccttgggagttcccaagccagaaatcacatgggagatgcctgaccactcccttctctcaacggcaagtaaagagaggacacatggaagtgagcagcttcacttacaaggtaccctagtcattcagaatccccaaacctccgattctgggatatacaaatgcacagcagaattcggc

SEQ ID NO: 724 - protein, 652 aa, Homo sapiens; identical to SEQ ID NO: 722

SEQ ID NO: 725 - DNA, 2902 bp, Homo sapiens; identical to SEQ ID NO: 711
  CDS (11)..(2893)

SEQ ID NO: 726 - protein, 961 aa, Homo sapiens
NSDAFLPCEAVGNPLPTIHWTRVPSGLDLSKRKQNSRVQVLPNGTLSIQRVEIQDRGQYLCSASNLFGTDHLHVTLSVVSYPPRILERRTKEITVHSGSTVELKCRAEGRPSPTVTWILANQTVVSESSQGSRQAVVTVDGTLVLHNLSIYDRGFYKCVASNPGGQDSLLVKIQVIAAPPVILEQRRQVIVGTWGESLKLPCTAKGTPQPSVYWVLSDGTEVKPLQFTNSKLFLFSNGTLYIRNLASSDRGTYECIATSSTGSERRVVMLTMEERVTSPRIEAASQKRTEVNFGDKLLLNCSATGEPKPQIMWRLPSKAVVDQQHRVGSWIHVYPNGSLFIGSVTEKDSGVYLCVARNKMGDDLILMHVSLRLKPAKIDHKQYFRKQVLHGKDFQVDCKASGSPVPEISWSLPDGTMINNAMQADDSGHRTRRYTLFNNGTLYFNKVGVAEEGDYTCYAQNTLGKDEMKVHLTVITAAPRIRQSNKTNKRIKAGDTAVLDCEVTGDPKPKIFWLLPSNDMISFSIDRYTFHANGSLTINKVKLLDSGEYVCVARNPSGDDTKMYKLDVVSKPPLINGLYTNRTVIKATAVRHSKKHFDCRAEGTPSPEVMWIMPDNIFLTAPYYGSRITVHKNGTLEIRNVRLSDSADFICVARNEGGESVLVVQLEVLEMLRRPTFRNPFNEKIVAQLGKSTALNCSVDGNPPPEIIWILPNGTRFSNGPQSYQYLIASNGSFIISKTTREDAGKYRCAARNKVGYIEKLVILEIGQKPVILTYAPGTVKGISGESLSLHCVSDGIPKPNIKWTMPSGYVVDRPQINGKYILHDNGTLVIKEATAYDRGNYICKAQNSVGHTLITVPVMIVAYPPRITNRPPRSIVTRTGAAFQLHCVALGVPKPEITWEMPDHSLLSTASKERTHGSEQLHLQGTLVIQNPQTSDSGIYKCTAKNPLGSDYAATYIQVI

SEQ ID NO: 727 - DNA, 2902 bp, Homo sapiens; identical to SEQ ID NO: 713
  CDS (11)..(2893)

SEQ ID NO: 728 - protein, 961 aa, Homo sapiens; identical to SEQ ID NO: 726

SEQ ID NO: 729 - DNA, 778 bp, Homo sapiens
  CDS (11)..(769)
caccggatccgcctgtcctcgccgctgtgcctgttatatgcctacggaggtacactgcacatttcggtacctgacttccatcccagacagcatcccgcccaatgtggaacgcatcaatttaggatacaacagcttggttagattgatggaaacagatttttctggcctgaccaaactggagttactcatgcttcacagcaatggcattcacacaatccctgacaagaccttctcagatttgcaggccttgcaggtcttaaaaatgagctataacaaagtccgaaaacttcagaaagatactttttatggcctcaggagcttgacacgattgcacatggaccacaacaatattgagtttataaacccagaggtttttgatgggctcaactttctccgcctggtgcacttggaaggaaatcagctcactaagctccacccagatacatttgtctctttgagctacctccagatatttaaaatctctttcattaagttcctatacttgtctgataacttcctgacctccctccctcaagagatggtctcctatatgcctgacctagacagcctttacctgcatggaaacccatggacctgtgattgccatttaaagtggttgtctgactggatacaggagaagccagatgtaataaaatgcaaaaaagatagaagtccctctagtgctcagcagtgtccactttgcatgaaccctaggacttctaaaggcaagccgttagctatggtctcagctgcagctttccagtgtgccctcgagggc

SEQ ID NO: 730 - protein, 253 aa, Homo sapiens; identical to SEQ ID NO: 720

SEQ ID NO: 731 - DNA, 7876 bp, Homo sapiens
  CDS (6)..(7856)
  misc_feature (746)..(746): Wherein n may be a, c, g or t
tcaggatgaaggtaaaaggcagaggaatcacctgcttgctggtctcctttgctgtgatctgcctggtcgccacccctgggggcaagacctgtcctcgccgctgtgcctgttatatgcctacggaggtacactgcacatttcggtacctgacttccatcccagacagcatcccgcccaatgtggaacgcatcaatttagggtacaacagcttggttagattgatggaaacagatttttctggcctgaccaaactggagttactcatgcttcacagcaatggcattcacacaatccctgacaagaccttctcagatttgcaggccttgcaggtgagactgatggtcttaaaaatgagctataataaagtccgaaaacttcagaaagatactttttatggcctcaggagcttgacacgattgcacatggaccacaacaatattgagtttataaacccagaggttttttatgggctcaactttctccgcctggtgcacttggaaggaaatcagctcactaagctccacccagatacatttgtctctttgagctacctccagatatttaaaatctctttcattaagttcctatacttgtctgataacttcctgacctccctccctcaagagatggtctcctatatgcctgacctagacagcctttacctgcatggaaacccatggacctgtgattgccatttaaagtggttgtctgactggatacaggagaagccaggtatctatattgtnttaccagatgtaataaaatgcaaaaaagatagaagtccctctagtgctcagcagtgtccactttgcatgaaccctaggacttctaaaggcaagccgttagctatggtctcagctgcagctttccagtgtgccaagccaaccattgactcatccctgaaatcaaagagcctgactattctggaagacagtagttctgctttcatctctccccaaggtttcatggcaccctttggctccctcactttgaatatgacagatcagtctggaaatgaagctaacatggtctgcagtattcaaaagccctcaaggacatcacccattgcattcactgaagaaaatgactacatcgtgctaaatacttcattttcaacatttttggtgtgcaacatagattacggtcacattcagccagtgtggcaaattttggctttgtacagtgattctcctctgatactagaaaggagccacttgcttagtgaaacaccgcagctctattacaaatataaacaggtggctcctaagcctgaagacatttttaccaacatagaggcagatctcagagcagatccctcttggttaatgcaagaccaaatttccttgcagctgaacagaactgccaccacattcagtacattacagatccagtactccagtgatgctcaaatcactttaccaagagcagagatgaggccagtgaaacacaaatggactatgatttcaagggataacaatactaagctggaacatactgtcttggtaggtggaaccgttggcctgaactgcccaggccaaggagaccccaccccacacgtggattggcttctagctgatggaagtaaagtgagagccccttatgtcagtgaggatggacggatcctaatagacaaaagtggaaaattggaactccagatggctgatagttttgacacaggcgtatatcactgtataagcagcaattatgatgatgcagatattctcacctataggataactgtggtagaacctttggtcgaagcctatcaggaaaatgggattcatcacacagttttcattggtgaaacacttgatcttccatgccattctactggtatcccagatgcctctattagctgggttattccaggaaacaatgtgctctatcagtcatcaagagacaagaaagttctaaacaatggcacattaagaatattacaggtcaccccgaaagaccaaggttattatcgctgtgtggcagccaacccatcaggggttgattttttgattttccaagtttcagtcaagatgaaaggacaaaggcccttggagcatgatggagaaacagagggatctggacttgatgagtccaatcctattgctcatcttaaggagccaccaggtgcacaactccgtacatctgctctgatggaggctgaggttggaaaacacacctcaagcacaagtaagaggcacaactatcgggaattaacactccagcgacgtggagattcaacacatcgacgttttagggagaataggaggcatttccctccctctgctaggagaattgacccacaacattgggcggcactgttggagaaagctaaaaagaatgctatgccagacaagcgagaaaataccacagtgagcccacccccagtggtcacccaactcccaaacatacctggtgaagaagacgattcctcaggcatgctcgctctacatgaggaatttatggtcccggccactaaagctttgaaccttccagcaaggacagtgactgctgactccagaacaatatctgatagtcctatgacaaacataaattatggcacagaattctctcctgttgtgaattcacaaatactaccacctgaagaacccacagatttcaaactgtctactgctattaaaactacagccatgtcaaagaatataaacccaaccatgtcaagccaaatacaaggcacaaccaatcaacattcatccactgtctttccactgctacttggagcaactgaatttcaggactctgaccagatgggaagaggaagagagcatttccaaagtagacccccaataacagtaaggactatgatcaaagatgtcaatgtcaaaatgcttagtagcaccaccaacaaactattattagagtcagtaaataccacaaatagtcatcagacatctgtaagagaagtgagtgaacccaggcacaatcacttctattctcacactactcaaatacttagcacctccacgttcccttcagatccacacacagctgctcattctcagtttccgatccctagaaatagtacagttaacatcccgctgttcagacgctttgggaggcagaggaaaattggcggaagggggcggattatcagcccatatagaactccagttctgcgacggcatagatacagcattttcaggtcaacaaccagaggttcttctgaaaaaagcactactgcattctcagccacagtgctcaatgtgacatgtctgtcctgtcttcccagggagaggctcaccactgccacagcagcattgtcttttccaagtgctgctcccatcaccttccccaaagctgacattgctagagtcccatcagaagagtctacaactctagtccagaatccactattactacttgagaacaaacccagtgtagagaaaacaacacccacaataaaatatttcaggactgaaatttcccaagtgactccaactggtgcagtcatgacatatgctccaacatccatacccatggaaaaaactcacaaagtaaacgccagttacccacgtgtgtctagcaccaatgaagctaaaagagattcagtgattacatcgtcactttcaggtgctatcaccaagccaccaatgactattatagccattacaaggttttcaagaaggaaaattccctggcaacagaactttgtaaataaccataacccaaaaggcagattaaggaatcaacataaagttagtttacaaaaaagcacagctgtgatgcttcctaaaacatctcctgctttaccacagagacaaagtctcccctcgcaccacactacgaccaaaacacacaatcctggaagtcttccaacaaagaaggagcttcccttcccaccccttaaccctatgcttcctagtattataagcaaagactcaagtacaaaaagcatcatatcaacgcaaacagcaataccagcaacaactcctaccttccctgcatctgtcatcacttatgaaacccaaacagagagatctagagcacaaacaatacaaagagaacaggagcctcaaaagaagaacaggactgacccaaacatctctccagaccagagttctggcttcactacacccactgctatgacacctcctgttctaaccacagccgaaacttcagtcaagcccagtgtctctgcattcactcattccccaccagaaaacacaactgggatttcaagcacaatcagttttcattcaagaactcttaatctgacagatgtgattgaagaactagcccaagcaagtactcagactttgaagagcacaattgcttctgaaacaactttgtccagcaaatcacaccagagtaccacaactaggaaagcaatcattagacactcaaccataccaccattcttgagcagcagtgctactctaatgccagttcccatctcccctccctttactcagagagcagttactgacaacgtggcgactcccatttccgggcttatgacaaatacagtggtcaagctgcacgaatcctcaaggcacaatgctaaaccacagcaattagtagcagaggttgcaacatcccccaaggttcacccaaatgccaagttcacaattggaaccactcacttcatctactctaatctgttacattctactcccatgccagcactaacaacagttaaatcacagaattctaaattaactccatctccctgggcagaaaaccaattttggcacaaaccatactcagaaattgctgaaaaaggcaaaaagccagaagtaagcatgttggctactacaggcctgtccgaggccaccactcttgtttcagattgggatggacagaagaacacaaagaagagtgactttgataagaaaccagttcaagaagcaacaacttccaaactccttccctttgactctttgtctaggtatatatttgaaaagcccaggatagttggaggaaaagctgcaagttttactattccagctaactcagatgcctttcttccctgtgaagctgttggaaatcccctgcccaccattcattggaccagagtcccatcaggtatgtcaggacttgatttatctaagaggaaacagaatagcagggtccaggttctccccaatggtaccctgtccatccagagggtggaaattcaggaccgcggacagtacttgtgttccgcatccaatctgtttggcacagaccaccttcatgtcaccttgtctgtggtttcctatcctcccaggatcctggagagacgtaccaaagagatcacagttcattccggaagcactgtggaactgaagtgcagagcagaaggtaggccaagccctacagttacctggattcttgcaaaccaaacagttgtctcagaatcatcccagggaagtaggcaggctgtggtgacggttgacggaacattggtcctccacaatctcagtatttatgaccgtggcttttacaaatgtgtggccagcaacccaggtggccaggattcactgctggttaaaatacaagtcattgcagcaccacctgttattctagagcaaaggaggcaagtcattgtaggcacttggggtgaaagtttaaaactgccctgtactgcaaaaggaactcctcagcccagcgtttactgggtcctctctgatggcactgaagtgaaaccattacagtttaccaattccaagttgttcttattttcaaatgggactttgtatataagaaacctagcctcttcagacaggggcacttatgaatgcattgctaccagttccactggttcggagcgaagagtagtaatgcttacaatggaagagcgagtgaccagccccaggatagaagctgcatcccagaaaaggactgaagtgaattttggggacaaattactactgaactgctcagccactggggagcccaaaccccaaataatgtggaggttaccatccaaggctgtggtcgaccagcagcatagggtgggcagctggatccacgtctaccctaatggatccctgtttattggatcagtaacagaaaaagacagtggtgtctacttgtgtgtggcaagaaacaaaatgggggatgatctgatactgatgcatgttagcctaagactgaaacctgccaaaattgaccacaagcagtattttagaaagcaagtgctccatgggaaagatttccaagtagattgcaaagcttccggctccccagtgccagagatatcttggagtttgcctgatggaaccatgatcaacaatgcaatgcaagccgatgacagtggccacaggactaggagatatacccttttcaacaatggaactttatacttcaacaaagttggggtagcggaggaaggagattatacttgctatgcccagaacaccctagggaaagatgaaatgaaggtccacttaacagttataacagctgctccccggataaggcagagtaacaaaaccaacaagagaatcaaagctggagacacagctgtccttgactgtgaggtcactggggatcccaaaccaaaaatattttggttgctgccttccaatgacatgatttccttctccattgataggtacacatttcatgccaatgggtctttgaccatcaacaaagtgaaactgctcgattctggagagtacgtatgtgtagcccgaaatcccagtggggatgacaccaaaatgtacaaactggatgtggtctctaaacctccattaatcaatggtctgtatacaaacagaactgttattaaagccacagctgtgagacattccaaaaaacactttgactgcagagctgaagggacaccatctcctgaagtcatgtggatcatgccagacaatattttcctcacagccccatactatggaagcagaatcacagtccataaaaatggaaccttggaaattaggaatgtgaggctttcagattcagccgactttatctgtgtggcccgaaatgaaggtggagagagcgtgttggtagtacagttagaagtactggaaatgctgagaagaccgacatttagaaatccatttaatgaaaaaatagttgcccagctgggaaagtccacagcattgaattgctctgttgatggtaacccaccacctgaaataatctggattttaccaaatggcacacgattttccaatggaccacaaagttatcagtatctgatagcaagcaatggttcttttatcatttctaaaacaactcgggaggatgcaggaaaatatcgctgtgcagctaggaataaagttggctatattgagaaattagtcatattagaaattggccagaagccagttattcttacctatgcaccagggacagtaaaaggcatcagtggagaatctctatcactgcattgtgtgtctgatggaatccctaagccaaatatcaaatggactatgccaagtggttatgtagtagacaggcctcaaattaatgggaaatacatattgcatgacaatggcaccttagtcattaaagaagcaacagcttatgacagaggaaactatatctgtaaggctcaaaatagtgttggtcatacactgattactgttccagtaatgattgtagcctaccctccccgaattacaaatcgtccacccaggagtattgtcaccaggacaggggcagcctttcagctccactgtgtggccttgggagttcccaagccagaaatcacatgggagatgcctgaccactcccttctctcaacggcaagtaaagagaggacacatggaagtgagcagcttcacttacaaggtaccctagtcattcagaatccccaaacctccgattctgggatatacaaatgcacagcaaagaacccacttggtagtgattatgcagcaacgtatattcaagtaatctgacatgaaataataaagtc

SEQ ID NO: 732 - protein, 2617 aa, Homo sapiens
MKVKGRGITCLLVSFAVICLVATPGGKTCPRRCACYMPTEVHCTFRYLTSIPDSIPPNVERINLGYNSLVRLMETDFSGLTKLELLMLHSNGIHTIPDKTFSDLQALQVRLMVLKMSYNKVRKLQKDTFYGLRSLTRLHMDHNNIEFINPEVFYGLNFLRLVHLEGNQLTKLHPDTFVSLSYLQIFKISFIKFLYLSDNFLTSLPQEMVSYMPDLDSLYLHGNPWTCDCHLKWLSDWIQEKPGIYIVLPDVIKCKKDRSPSSAQQCPLCMNPRTSKGKPLAMVSAAAFQCAKPTIDSSLKSKSLTILEDSSSAFISPQGFMAPFGSLTLNMTDQSGNEANMVCSIQKPSRTSPIAFTEENDYIVLNTSFSTFLVCNIDYGHIQPVWQILALYSDSPLILERSHLLSETPQLYYKYKQVAPKPEDIFTNIEADLRADPSWLMQDQISLQLNRTATTFSTLQIQYSSDAQITLPRAEMRPVKHKWTMISRDNNTKLEHTVLVGGTVGLNCPGQGDPTPHVDWLLADGSKVRAPYVSEDGRILIDKSGKLELQMADSFDTGVYHCISSNYDDADILTYRITVVEPLVEAYQENGIHHTVFIGETLDLPCHSTGIPDASISWVIPGNNVLYQSSRDKKVLNNGTLRILQVTPKDQGYYRCVAANPSGVDFLIFQVSVKMKGQRPLEHDGETEGSGLDESNPIAHLKEPPGAQLRTSALMEAEVGKHTSSTSKRHNYRELTLQRRGDSTHRRFRENRRHFPPSARRIDPQHWAALLEKAKKNAMPDKRENTTVSPPPVVTQLPNIPGEEDDSSGMLALHEEFMVPATKALNLPARTVTADSRTISDSPMTNINYGTEFSPVVNSQILPPEEPTDFKLSTAIKTTAMSKNINPTMSSQIQGTTNQHSSTVFPLLLGATEFQDSDQMGRGREHFQSRPPITVRTMIKDVNVKMLSSTTNKLLLESVNTTNSHQTSVREVSEPRHNHFYSHTTQILSTSTFPSDPHTAAHSQFPIPRNSTVNIPLFRRFGRQRKIGGRGRIISPYRTPVLRRHRYSIFRSTTRGSSEKSTTAFSATVLNVTCLSCLPRERLTTATAALSFPSAAPITFPKADIARVPSEESTTLVQNPLLLLENKPSVEKTTPTIKYFRTEISQVTPTGAVMTYAPTSIPMEKTHKVNASYPRVSSTNEAKRDSVITSSLSGAITKPPMTIIAITRFSRRKIPWQQNFVNNHNPKGRLRNQHKVSLQKSTAVMLPKTSPALPQRQSLPSHHTTTKTHNPGSLPTKKELPFPPLNPMLPSIISKDSSTKSIISTQTAIPATTPTFPASVITYETQTERSRAQTIQREQEPQKKNRTDPNISPDQSSGFTTPTAMTPPVLTTAETSVKPSVSAFTHSPPENTTGISSTISFHSRTLNLTDVIEELAQASTQTLKSTIASETTLSSKSHQSTTTRKAIIRHSTIPPFLSSSATLMPVPISPPFTQRAVTDNVATPISGLMTNTVVKLHESSRHNAKPQQLVAEVATSPKVHPNAKFTIGTTHFIYSNLLHSTPMPALTTVKSQNSKLTPSPWAENQFWHKPYSEIAEKGKKPEVSMLATTGLSEATTLVSDWDGQKNTKKSDFDKKPVQEATTSKLLPFDSLSRYIFEKPRIVGGKAASFTIPANSDAFLPCEAVGNPLPTIHWTRVPSGMSGLDLSKRKQNSRVQVLPNGTLSIQRVEIQDRGQYLCSASNLFGTDHLHVTLSVVSYPPRILERRTKEITVHSGSTVELKCRAEGRPSPTVTWILANQTVVSESSQGSRQAVVTVDGTLVLHNLSIYDRGFYKCVASNPGGQDSLLVKIQVIAAPPVILEQRRQVIVGTWGESLKLPCTAKGTPQPSVYWVLSDGTEVKPLQFTNSKLFLFSNGTLYIRNLASSDRGTYECIATSSTGSERRVVMLTMEERVTSPRIEAASQKRTEVNFGDKLLLNCSATGEPKPQIMWRLPSKAVVDQQHRVGSWIHVYPNGSLFIGSVTEKDSGVYLCVARNKMGDDLILMHVSLRLKPAKIDHKQYFRKQVLHGKDFQVDCKASGSPVPEISWSLPDGTMINNAMQADDSGHRTRRYTLFNNGTLYFNKVGVAEEGDYTCYAQNTLGKDEMKVHLTVITAAPRIRQSNKTNKRIKAGDTAVLDCEVTGDPKPKIFWLLPSNDMISFSIDRYTFHANGSLTINKVKLLDSGEYVCVARNPSGDDTKMYKLDVVSKPPLINGLYTNRTVIKATAVRHSKKHFDCRAEGTPSPEVMWIMPDNIFLTAPYYGSRITVHKNGTLEIRNVRLSDSADFICVARNEGGESVLVVQLEVLEMLRRPTFRNPFNEKIVAQLGKSTALNCSVDGNPPPEIIWILPNGTRFSNGPQSYQYLIASNGSFIISKTTREDAGKYRCAARNKVGYIEKLVILEIGQKPVILTYAPGTVKGISGESLSLHCVSDGIPKPNIKWTMPSGYVVDRPQINGKYILHDNGTLVIKEATAYDRGNYICKAQNSVGHTLITVPVMIVAYPPRITNRPPRSIVTRTGAAFQLHCVALGVPKPEITWEMPDHSLLSTASKERTHGSEQLHLQGTLVIQNPQTSDSGIYKCTAKNPLGSDYAATYIQVI

SEQ ID NO: 733 - DNA, 7876 bp, Homo sapiens
  CDS (6)..(7856)
  misc_feature (746)..(746): Wherein n may be a, c, g or t
tcaggatgaaggtaaaaggcagaggaatcacctgcttgctggtctcctttgctgtgatctgcctggtcgccacccctgggggcaaggcctgtcctcgccgctgtgcctgttacatgcctacggaggtacactgcacatttcggtacctgacttccatcccagacagcatcccgcccaatgtggaacgcatcaatttagggtacaacagcttggttagattgatggaaacagatttttctggcctgaccaaactggagttactcatgcttcacagcaatggcattcacacaatccctgacaagaccttctcagatttgcaggccttgcaggtgagactgatggtcttaaaaatgagctataataaagtccgaaaacttcagaaagatactttttatggcctcaggagcttgacacgattgcacatggaccacaacaatattgagtttataaacccagaggttttttatgggctcaactttctccgcctggtgcacttggaaggaaatcagctcactaagctccacccagatacatttgtctctttgagctacctccagatatttaaaatctctttcattaagttcctatacttgtctgataacttcctgacctccctccctcaagagatggtctcctatatgcctgacctagacagcctttacctgcatggaaacccatggacctgtgattgccatttaaagtggttgtctgactggatacaggagaagccaggtatctatattgtnttaccagatgtaataaaatgcaaaaaagatagaagtccctctagtgctcagcagtgtccactttgcatgaaccctaggacttctaaaggcaagccgttagctatggtctcagctgcagctttccagtgtgccaagccaaccattgactcatccctgaaatcaaagagcctgactattctggaagacagtagttctgctttcatctctccccaaggtttcatggcaccctttggctccctcactttgaatatgacagatcagtctggaaatgaagctaacatggtctgcagtattcaaaagccctcaaggacatcacccattgcattcactgaagaaaatgactacatcgtgctaaatacttcattttcaacatttttggtgtgcaacatagattacggtcacattcagccagtgtggcaaattttggctttgtacagtgattctcctctgatactagaaaggagccacttgcttagtgaaacaccgcagctctattacaaatataaacaggtggctcctaagcctgaagacatttttaccaacatagaggcagatctcagagcagatccctcttggttaatgcaagaccaaatttccttgcagctgaacagaactgccaccacattcagtacattacagatccagtactccagtgatgctcaaatcactttaccaagagcagagatgaggccagtgaaacacaaatggactatgatttcaagggataacaatactaagctggaacatactgtcttggtaggtggaaccgttggcctgaactgcccaggccaaggagaccccaccccacacgtggattggcttctagctgatggaagtaaagtgagagccccttatgtcagtgaggatggacggatcctaatagacaaaagtggaaaattggaactccagatggctgatagttttgacacaggcgtatatcactgtataagcagcaattatgatgatgcagatattctcacctataggataactgtggtagaacctttggtcgaagcctatcaggaaaatgggattcatcacacagttttcattggtgaaacacttgatcttccatgccattctactggtatcccagatgcctctattagctgggttattccaggaaacaatgtgctctatcagtcatcaagagacaagaaagttctaaacaatggcacattaagaatattacaggtcaccccgaaagaccaaggttattatcgctgtgtggcagccaacccatcaggggttgattttttgattttccaagtttcagtcaagatgaaaggacaaaggcccttggagcatgatggagaaacagagggatctggacttgatgagtccaatcctattgctcatcttaaggagccaccaggtgcacaactccgtacatctgctctgatggaggctgaggttggaaaacacacctcaagcacaagtaagaggcacaactatcgggaattaacactccagcgacgtggagattcaacacatcgacgttttagggagaataggaggcatttccctccctctgctaggagaattgacccacaacattgggcggcactgttggagaaagctaaaaagaatgctatgccagacaagcgagaaaataccacagtgagcccacccccagtggtcacccaactcccaaacatacctggtgaagaagacgattcctcaggcatgctcgctctacatgaggaatttatggtcccggccactaaagctttgaaccttccagcaaggacagtgactgctgactccagaacaatatctgatagtcctatgacaaacataaattatggcacagaattctctcctgttgtgaattcacaaatactaccacctgaagaacccacagatttcaaactgtctactgctattaaaactacagccatgtcaaagaatataaacccaaccatgtcaagccaaatacaaggcacaaccaatcaacattcatccactgtctttccactgctacttggagcaactgaatttcaggactctgaccagatgggaagaggaagagagcatttccaaagtagacccccaataacagtaaggactatgatcaaagatgtcaatgtcaaaatgcttagtagcaccaccaacaaactattattagagtcagtaaataccacaaatagtcatcagacatctgtaagagaagtgagtgaacccaggcacaatcacttctattctcacactactcaaatacttagcacctccacgttcccttcagatccacacacagctgctcattctcagtttccgatccctagaaatagtacagttaacatcccgctgttcagacgctttgggaggcagaggaaaattggcggaagggggcggattatcagcccatatagaactccagttctgcgacggcatagatacagcattttcaggtcaacaaccagaggttcttctgaaaaaagcactactgcattctcagccacagtgctcaatgtgacatgtctgtcctgtcttcccagggagaggctcaccactgccacagcagcattgtcttttccaagtgctgctcccatcaccttccccaaagctgacattgctagagtcccatcagaagagtctacaactctagtccagaatccactattactacttgagaacaaacccagtgtagagaaaacaacacccacaataaaatatttcaggactgaaatttcccaagtgactccaactggtgcagtcatgacatatgctccaacatccatacccatggaaaaaactcacaaagtaaacgccagttacccacgtgtgtctagcaccaatgaagctaaaagagattcagtgattacatcgtcactttcaggtgctatcaccaagccaccaatgactattatagccattacaaggttttcaagaaggaaaattccctggcaacagaactttgtaaataaccataacccaaaaggcagattaaggaatcaacataaagttagtttacaaaaaagcacagctgtgatgcttcctaaaacatctcctgctttaccacagagacaaagtctcccctcgcaccacactacgaccaaaacacacaatcctggaagtcttccaacaaagaaggagcttcccttcccaccccttaaccctatgcttcctagtattataagcaaagactcaagtacaaaaagcatcatatcaacgcaaacagcaataccagcaacaactcctaccttccctgcatctgtcatcacttatgaaacccaaacagagagatctagagcacaaacaatacaaagagaacaggagcctcaaaagaagaacaggactgacccaaacatctctccagaccagagttctggcttcactacacccactgctatgacacctcctgttctaaccacagccgaaacttcagtcaagcccagtgtctctgcattcactcattccccaccagaaaacacaactgggatttcaagcacaatcagttttcattcaagaactcttaatctgacagatgtgattgaagaactagcccaagcaagtactcagactttgaagagcacaattgcttctgaaacaactttgtccagcaaatcacaccagagtaccacaactaggaaagcaatcattagacactcaaccataccaccattcttgagcagcagtgctactctaatgccagttcccatctcccctccctttactcagagagcagttactgacaacgtggcgactcccatttccgggcttatgacaaatacagtggtcaagctgcacgaatcctcaaggcacaatgctaaaccacagcaattagtagcagaggttgcaacatcccccaaggttcacccaaatgccaagttcacaattggaaccactcacttcatctactctaatctgttacattctactcccatgccagcactaacaacagttaaatcacagaattctaaattaactccatctccctgggcagaaaaccaattttggcacaaaccatactcagaaattgctgaaaaaggcaaaaagccagaagtaagcatgttggctactacaggcctgtccgaggccaccactcttgtttcagattgggatggacagaagaacacaaagaagagtgactttgataagaaaccagttcaagaagcaacaacttccaaactccttccctttgactctttgtctaggtatatatttgaaaagcccaggatagttggaggaaaagctgcaagttttactattccagctaactcagatgcctttcttccctgtgaagctgttggaaatcccctgcccaccattcattggaccagagtcccatcaggtatgtcaggacttgatttatctaagaggaaacagaatagcagggtccaggttctccccaatggtaccctgtccatccagagggtggaaattcaggaccgcggacagtacttgtgttccgcatccaatctgtttggcacagaccaccttcatgtcaccttgtctgtggtttcctatcctcccaggatcctggagagacgtaccaaagagatcacagttcattccggaagcactgtggaactgaagtgcagagcagaaggtaggccaagccctacagttacctggattcttgcaaaccaaacagttgtctcagaatcatcccagggaagtaggcaggctgtggtgacggttgacggaacattggtcctccacaatctcagtatttatgaccgtggcttttacaaatgtgtggccagcaacccaggtggccaggattcactgctggttaaaatacaagtcattgcagcaccacctgttattctagagcaaaggaggcaagtcattgtaggcacttggggtgaaagtttaaaactgccctgtactgcaaaaggaactcctcagcccagcgtttactgggtcctctctgatggcactgaagtgaaaccattacagtttaccaattccaagttgttcttattttcaaatgggactttgtatataagaaacctagcctcttcagacaggggcacttatgaatgcattgctaccagttccactggttcggagcgaagagtagtaatgcttacaatggaagagcgagtgaccagccccaggatagaagctgcatcccagaaaaggactgaagtgaattttggggacaaattactactgaactgctcagccactggggagcccaaaccccaaataatgtggaggttaccatccaaggctgtggtcgaccagcagcatagggtgggcagctggatccacgtctaccctaatggatccctgtttattggatcagtaacagaaaaagacagtggtgtctacttgtgtgtggcaagaaacaaaatgggggatgatctgatactgatgcatgttagcctaagactgaaacctgccaaaattgaccacaagcagtattttagaaagcaagtgctccatgggaaagatttccaagtagattgcaaagcttccggctccccagtgccagagatatcttggagtttgcctgatggaaccatgatcaacaatgcaatgcaagccgatgacagtggccacaggactaggagatatacccttttcaacaatggaactttatacttcaacaaagttggggtagcggaggaaggagattatacttgctatgcccagaacaccctagggaaagatgaaatgaaggtccacttaacagttataacagctgctccccggataaggcagagtaacaaaaccaacaagagaatcaaagctggagacacagctgtccttgactgtgaggtcactggggatcccaaaccaaaaatattttggttgctgccttccaatgacatgatttccttctccattgataggtacacatttcatgccaatgggtctttgaccatcaacaaagtgaaactgctcgattctggagagtacgtatgtgtagcccgaaatcccagtggggatgacaccaaaatgtacaaactggatgtggtctctaaacctccattaatcaatggtctgtatacaaacagaactgttattaaagccacagctgtgagacattccaaaaaacactttgactgcagagctgaagggacaccatctcctgaagtcatgtggatcatgccagacaatattttcctcacagccccatactatggaagcagaatcacagtccataaaaatggaaccttggaaattaggaatgtgaggctttcagattcagccgactttatctgtgtggcccgaaatgaaggtggagagagcgtgttggtagtacagttagaagtactggaaatgctgagaagaccgacatttagaaatccatttaatgaaaaaatagttgcccagctgggaaagtccacagcattgaattgctctgttgatggtaacccaccacctgaaataatctggattttaccaaatggcacacgattttccaatggaccacaaagttatcagtatctgatagcaagcaatggttcttttatcatttctaaaacaactcgggaggatgcaggaaaatatcgctgtgcagctaggaataaagttggctatattgagaaattagtcatattagaaattggccagaagccagttattcttacctatgcaccagggacagtaaaaggcatcagtggagaatctctatcactgcattgtgtgtctgatggaatccctaagccaaatatcaaatggactatgccaagtggttatgtagtagacaggcctcaaattaatgggaaatacatattgcatgacaatggcaccttagtcattaaagaagcaacagcttatgacagaggaaactatatctgtaaggctcaaaatagtgttggtcatacactgattactgttccagtaatgattgtagcctaccctccccgaattacaaatcgtccacccaggagtattgtcaccaggacaggggcagcctttcagctccactgtgtggccttgggagttcccaagccagaaatcacatgggagatgcctgaccactcccttctctcaacggcaagtaaagagaggacacatggaagtgagcagcttcacttacaaggtaccctagtcattcagaatccccaaacctccgattctgggatatacaaatgcacagcaaagaacccacttggtagtgattatgcagcaacgtatattcaagtaatctgacatgaaataataaagtc

SEQ ID NO: 734 - protein, 2617 aa, Homo sapiens; identical to SEQ ID NO: 666

SEQ ID NO: 735 - DNA, 7876 bp, Homo sapiens
  CDS (6)..(7856)
  misc_feature (746)..(746): Wherein n may be a, c, g or t
tcaggatgaaggtaaaaggcagaggaatcacctgcttgctggtctcctttgctgtgatctgcctggtcgccacccctgggggcaaggcctgtcctcgccgctgtgcctgttatatgcctacggaggtacactgcacatttcggtacctgacttccatcccggacagcatcccgcccaatgtggaacgcatcaatttagggtacaacagcttggttagattgatggaaacagatttttctggcctgaccaaactggagttactcatgcttcacagcaatggcattcacacaatccctgacaagaccttctcagatttgcaggccttgcaggtgagactgatggtcttaaaaatgagctataataaagtccgaaaacttcagaaagatactttttatggcctcaggagcttgacacgattgcacatggaccacaacaatattgagtttataaacccagaggttttttatgggctcaactttctccgcctggtgcacttggaaggaaatcagctcactaagctccacccagatacatttgtctctttgagctacctccagatatttaaaatctctttcattaagttcctatacttgtctgataacttcctgacctccctccctcaagagatggtctcctatatgcctgacctagacagcctttacctgcatggaaacccatggacctgtgattgccatttaaagtggttgtctgactggatacaggagaagccaggtatctatattgtnttaccagatgtaataaaatgcaaaaaagatagaagtccctctagtgctcagcagtgtccactttgcatgaaccctaggacttctaaaggcaagccgttagctatggtctcagctgcagctttccagtgtgccaagccaaccattgactcatccctgaaatcaaagagcctgactattctggaagacagtagttctgctttcatctctccccaaggtttcatggcaccctttggctccctcactttgaatatgacagatcagtctggaaatgaagctaacatggtctgcagtattcaaaagccctcaaggacatcacccattgcattcactgaagaaaatgactacatcgtgctaaatacttcattttcaacatttttggtgtgcaacatagattacggtcacattcagccagtgtggcaaattttggctttgtacagtgattctcctctgatactagaaaggagccacttgcttagtgaaacaccgcagctctattacaaatataaacaggtggctcctaagcctgaagacatttttaccaacatagaggcagatctcagagcagatccctcttggttaatgcaagaccaaatttccttgcagctgaacagaactgccaccacattcagtacattacagatccagtactccagtgatgctcaaatcactttaccaagagcagagatgaggccagtgaaacacaaatggactatgatttcaagggataacaatactaagctggaacatactgtcttggtaggtggaaccgttggcctgaactgcccaggccaaggagaccccaccccacacgtggattggcttctagctgatggaagtaaagtgagagccccttatgtcagtgaggatggacggatcctaatagacaaaagtggaaaattggaactccagatggctgatagttttgacacaggcgtatatcactgtataagcagcaattatgatgatgcagatattctcacctataggataactgtggtagaacctttggtcgaagcctatcaggaaaatgggattcatcacacagttttcattggtgaaacacttgatcttccatgccattctactggtatcccagatgcctctattagctgggttattccaggaaacaatgtgctctatcagtcatcaagagacaagaaagttctaaacaatggcacattaagaatattacaggtcaccccgaaagaccaaggttattatcgctgtgtggcagccaacccatcaggggttgattttttgattttccaagtttcagtcaagatgaaaggacaaaggcccttggagcatgatggagaaacagagggatctggacttgatgagtccaatcctattgctcatcttaaggagccaccaggtgcacaactccgtacatctgctctgatggaggctgaggttggaaaacacacctcaagcacaagtaagaggcacaactatcgggaattaacactccagcgacgtggagattcaacacatcgacgttttagggagaataggaggcatttccctccctctgctaggagaattgacccacaacattgggcggcactgttggagaaagctaaaaagaatgctatgccagacaagcgagaaaataccacagtgagcccacccccagtggtcacccaactcccaaacatacctggtgaagaagacgattcctcaggcatgctcgctctacatgaggaatttatggtcccggccactaaagctttgaaccttccagcaaggacagtgactgctgactccagaacaatatctgatagtcctatgacaaacataaattatggcacagaattctctcctgttgtgaattcacaaatactaccacctgaagaacccacagatttcaaactgtctactgctattaaaactacagccatgtcaaagaatataaacccaaccatgtcaagccaaatacaaggcacaaccaatcaacattcatccactgtctttccactgctacttggagcaactgaatttcaggactctgaccagatgggaagaggaagagagcatttccaaagtagacccccaataacagtaaggactatgatcaaagatgtcaatgtcaaaatgcttagtagcaccaccaacaaactattattagagtcagtaaataccacaaatagtcatcagacatctgtaagagaagtgagtgaacccaggcacaatcacttctattctcacactactcaaatacttagcacctccacgttcccttcagatccacacacagctgctcattctcagtttccgatccctagaaatagtacagttaacatcccgctgttcagacgctttgggaggcagaggaaaattggcggaagggggcggattatcagcccatatagaactccagttctgcgacggcatagatacagcattttcaggtcaacaaccagaggttcttctgaaaaaagcactactgcattctcagccacagtgctcaatgtgacatgtctgtcctgtcttcccagggagaggctcaccactgccacagcagcattgtcttttccaagtgctgctcccatcaccttccccaaagctgacattgctagagtcccatcagaagagtctacaactctagtccagaatccactattactacttgagaacaaacccagtgtagagaaaacaacacccacaataaaatatttcaggactgaaatttcccaagtgactccaactggtgcagtcatgacatatgctccaacatccatacccatggaaaaaactcacaaagtaaacgccagttacccacgtgtgtctagcaccaatgaagctaaaagagattcagtgattacatcgtcactttcaggtgctatcaccaagccaccaatgactattatagccattacaaggttttcaagaaggaaaattccctggcaacagaactttgtaaataaccataacccaaaaggcagattaaggaatcaacataaagttagtttacaaaaaagcacagctgtgatgcttcctaaaacatctcctgctttaccacagagacaaagtctcccctcgcaccacactacgaccaaaacacacaatcctggaagtcttccaacaaagaaggagcttcccttcccaccccttaaccctatgcttcctagtattataagcaaagactcaagtacaaaaagcatcatatcaacgcaaacagcaataccagcaacaactcctaccttccctgcatctgtcatcacttatgaaacccaaacagagagatctagagcacaaacaatacaaagagaacaggagcctcaaaagaagaacaggactgacccaaacatctctccagaccagagttctggcttcactacacccactgctatgacacctcctgttctaaccacagccgaaacttcagtcaagcccagtgtctctgcattcactcattccccaccagaaaacacaactgggatttcaagcacaatcagttttcattcaagaactcttaatctgacagatgtgattgaagaactagcccaagcaagtactcagactttgaagagcacaattgcttctgaaacaactttgtccagcaaatcacaccagagtaccacaactaggaaagcaatcattagacactcaaccataccaccattcttgagcagcagtgctactctaatgccagttcccatctcccctccctttactcagagagcagttactgacaacgtggcgactcccatttccgggcttatgacaaatacagtggtcaagctgcacgaatcctcaaggcacaatgctaaaccacagcaattagtagcagaggttgcaacatcccccaaggttcacccaaatgccaagttcacaattggaaccactcacttcatctactctaatctgttacattctactcccatgccagcactaacaacagttaaatcacagaattctaaattaactccatctccctgggcagaaaaccaattttggcacaaaccatactcagaaattgctgaaaaaggcaaaaagccagaagtaagcatgttggctactacaggcctgtccgaggccaccactcttgtttcagattgggatggacagaagaacacaaagaagagtgactttgataagaaaccagttcaagaagcaacaacttccaaactccttccctttgactctttgtctaggtatatatttgaaaagcccaggatagttggaggaaaagctgcaagttttactattccagctaactcagatgcctttcttccctgtgaagctgttggaaatcccctgcccaccattcattggaccagagtcccatcaggtatgtcaggacttgatttatctaagaggaaacagaatagcagggtccaggttctccccaatggtaccctgtccatccagagggtggaaattcaggaccgcggacagtacttgtgttccgcatccaatctgtttggcacagaccaccttcatgtcaccttgtctgtggtttcctatcctcccaggatcctggagagacgtaccaaagagatcacagttcattccggaagcactgtggaactgaagtgcagagcagaaggtaggccaagccctacagttacctggattcttgcaaaccaaacagttgtctcagaatcatcccagggaagtaggcaggctgtggtgacggttgacggaacattggtcctccacaatctcagtatttatgaccgtggcttttacaaatgtgtggccagcaacccaggtggccaggattcactgctggttaaaatacaagtcattgcagcaccacctgttattctagagcaaaggaggcaagtcattgtaggcacttggggtgaaagtttaaaactgccctgtactgcaaaaggaactcctcagcccagcgtttactgggtcctctctgatggcactgaagtgaaaccattacagtttaccaattccaagttgttcttattttcaaatgggactttgtatataagaaacctagcctcttcagacaggggcacttatgaatgcattgctaccagttccactggttcggagcgaagagtagtaatgcttacaatggaagagcgagtgaccagccccaggatagaagctgcatcccagaaaaggactgaagtgaattttggggacaaattactactgaactgctcagccactggggagcccaaaccccaaataatgtggaggttaccatccaaggctgtggtcgaccagcagcatagggtgggcagctggatccacgtctaccctaatggatccctgtttattggatcagtaacagaaaaagacagtggtgtctacttgtgtgtggcaagaaacaaaatgggggatgatctgatactgatgcatgttagcctaagactgaaacctgccaaaattgaccacaagcagtattttagaaagcaagtgctccatgggaaagatttccaagtagattgcaaagcttccggctccccagtgccagagatatcttggagtttgcctgatggaaccatgatcaacaatgcaatgcaagccgatgacagtggccacaggactaggagatatacccttttcaacaatggaactttatacttcaacaaagttggggtagcggaggaaggagattatacttgctatgcccagaacaccctagggaaagatgaaatgaaggtccacttaacagttataacagctgctccccggataaggcagagtaacaaaaccaacaagagaatcaaagctggagacacagctgtccttgactgtgaggtcactggggatcccaaaccaaaaatattttggttgctgccttccaatgacatgatttccttctccattgataggtacacatttcatgccaatgggtctttgaccatcaacaaagtgaaactgctcgattctggagagtacgtatgtgtagcccgaaatcccagtggggatgacaccaaaatgtacaaactggatgtggtctctaaacctccattaatcaatggtctgtatacaaacagaactgttattaaagccacagctgtgagacattccaaaaaacactttgactgcagagctgaagggacaccatctcctgaagtcatgtggatcatgccagacaatattttcctcacagccccatactatggaagcagaatcacagtccataaaaatggaaccttggaaattaggaatgtgaggctttcagattcagccgactttatctgtgtggcccgaaatgaaggtggagagagcgtgttggtagtacagttagaagtactggaaatgctgagaagaccgacatttagaaatccatttaatgaaaaaatagttgcccagctgggaaagtccacagcattgaattgctctgttgatggtaacccaccacctgaaataatctggattttaccaaatggcacacgattttccaatggaccacaaagttatcagtatctgatagcaagcaatggttcttttatcatttctaaaacaactcgggaggatgcaggaaaatatcgctgtgcagctaggaataaagttggctatattgagaaattagtcatattagaaattggccagaagccagttattcttacctatgcaccagggacagtaaaaggcatcagtggagaatctctatcactgcattgtgtgtctgatggaatccctaagccaaatatcaaatggactatgccaagtggttatgtagtagacaggcctcaaattaatgggaaatacatattgcatgacaatggcaccttagtcattaaagaagcaacagcttatgacagaggaaactatatctgtaaggctcaaaatagtgttggtcatacactgattactgttccagtaatgattgtagcctaccctccccgaattacaaatcgtccacccaggagtattgtcaccaggacaggggcagcctttcagctccactgtgtggccttgggagttcccaagccagaaatcacatgggagatgcctgaccactcccttctctcaacggcaagtaaagagaggacacatggaagtgagcagcttcacttacaaggtaccctagtcattcagaatccccaaacctccgattctgggatatacaaatgcacagcaaagaacccacttggtagtgattatgcagcaacgtatattcaagtaatctgacatgaaataataaagtc

SEQ ID NO: 736 - protein, 2617 aa, Homo sapiens; identical to SEQ ID NO: 666

SEQ ID NO: 737 - DNA, 7876 bp, Homo sapiens
  CDS (6)..(7856)
  misc_feature (746)..(746): Wherein n may be a, c, g or t
tcaggatgaaggtaaaaggcagaggaatcacctgcttgctggtctcctttgctgtgatctgcctggtcgccacccctgggggcaaggcctgtcctcgccgctgtgcctgttatatgcctacggaggtacactgcacatttcggtacctgacttccatcccagacagcatcccgcccaatgtggaacacatcaatttagggtacaacagcttggttagattgatggaaacagatttttctggcctgaccaaactggagttactcatgcttcacagcaatggcattcacacaatccctgacaagaccttctcagatttgcaggccttgcaggtgagactgatggtcttaaaaatgagctataataaagtccgaaaacttcagaaagatactttttatggcctcaggagcttgacacgattgcacatggaccacaacaatattgagtttataaacccagaggttttttatgggctcaactttctccgcctggtgcacttggaaggaaatcagctcactaagctccacccagatacatttgtctctttgagctacctccagatatttaaaatctctttcattaagttcctatacttgtctgataacttcctgacctccctccctcaagagatggtctcctatatgcctgacctagacagcctttacctgcatggaaacccatggacctgtgattgccatttaaagtggttgtctgactggatacaggagaagccaggtatctatattgtnttaccagatgtaataaaatgcaaaaaagatagaagtccctctagtgctcagcagtgtccactttgcatgaaccctaggacttctaaaggcaagccgttagctatggtctcagctgcagctttccagtgtgccaagccaaccattgactcatccctgaaatcaaagagcctgactattctggaagacagtagttctgctttcatctctccccaaggtttcatggcaccctttggctccctcactttgaatatgacagatcagtctggaaatgaagctaacatggtctgcagtattcaaaagccctcaaggacatcacccattgcattcactgaagaaaatgactacatcgtgctaaatacttcattttcaacatttttggtgtgcaacatagattacggtcacattcagccagtgtggcaaattttggctttgtacagtgattctcctctgatactagaaaggagccacttgcttagtgaaacaccgcagctctattacaaatataaacaggtggctcctaagcctgaagacatttttaccaacatagaggcagatctcagagcagatccctcttggttaatgcaagaccaaatttccttgcagctgaacagaactgccaccacattcagtacattacagatccagtactccagtgatgctcaaatcactttaccaagagcagagatgaggccagtgaaacacaaatggactatgatttcaagggataacaatactaagctggaacatactgtcttggtaggtggaaccgttggcctgaactgcccaggccaaggagaccccaccccacacgtggattggcttctagctgatggaagtaaagtgagagccccttatgtcagtgaggatggacggatcctaatagacaaaagtggaaaattggaactccagatggctgatagttttgacacaggcgtatatcactgtataagcagcaattatgatgatgcagatattctcacctataggataactgtggtagaacctttggtcgaagcctatcaggaaaatgggattcatcacacagttttcattggtgaaacacttgatcttccatgccattctactggtatcccagatgcctctattagctgggttattccaggaaacaatgtgctctatcagtcatcaagagacaagaaagttctaaacaatggcacattaagaatattacaggtcaccccgaaagaccaaggttattatcgctgtgtggcagccaacccatcaggggttgattttttgattttccaagtttcagtcaagatgaaaggacaaaggcccttggagcatgatggagaaacagagggatctggacttgatgagtccaatcctattgctcatcttaaggagccaccaggtgcacaactccgtacatctgctctgatggaggctgaggttggaaaacacacctcaagcacaagtaagaggcacaactatcgggaattaacactccagcgacgtggagattcaacacatcgacgttttagggagaataggaggcatttccctccctctgctaggagaattgacccacaacattgggcggcactgttggagaaagctaaaaagaatgctatgccagacaagcgagaaaataccacagtgagcccacccccagtggtcacccaactcccaaacatacctggtgaagaagacgattcctcaggcatgctcgctctacatgaggaatttatggtcccggccactaaagctttgaaccttccagcaaggacagtgactgctgactccagaacaatatctgatagtcctatgacaaacataaattatggcacagaattctctcctgttgtgaattcacaaatactaccacctgaagaacccacagatttcaaactgtctactgctattaaaactacagccatgtcaaagaatataaacccaaccatgtcaagccaaatacaaggcacaaccaatcaacattcatccactgtctttccactgctacttggagcaactgaatttcaggactctgaccagatgggaagaggaagagagcatttccaaagtagacccccaataacagtaaggactatgatcaaagatgtcaatgtcaaaatgcttagtagcaccaccaacaaactattattagagtcagtaaataccacaaatagtcatcagacatctgtaagagaagtgagtgaacccaggcacaatcacttctattctcacactactcaaatacttagcacctccacgttcccttcagatccacacacagctgctcattctcagtttccgatccctagaaatagtacagttaacatcccgctgttcagacgctttgggaggcagaggaaaattggcggaagggggcggattatcagcccatatagaactccagttctgcgacggcatagatacagcattttcaggtcaacaaccagaggttcttctgaaaaaagcactactgcattctcagccacagtgctcaatgtgacatgtctgtcctgtcttcccagggagaggctcaccactgccacagcagcattgtcttttccaagtgctgctcccatcaccttccccaaagctgacattgctagagtcccatcagaagagtctacaactctagtccagaatccactattactacttgagaacaaacccagtgtagagaaaacaacacccacaataaaatatttcaggactgaaatttcccaagtgactccaactggtgcagtcatgacatatgctccaacatccatacccatggaaaaaactcacaaagtaaacgccagttacccacgtgtgtctagcaccaatgaagctaaaagagattcagtgattacatcgtcactttcaggtgctatcaccaagccaccaatgactattatagccattacaaggttttcaagaaggaaaattccctggcaacagaactttgtaaataaccataacccaaaaggcagattaaggaatcaacataaagttagtttacaaaaaagcacagctgtgatgcttcctaaaacatctcctgctttaccacagagacaaagtctcccctcgcaccacactacgaccaaaacacacaatcctggaagtcttccaacaaagaaggagcttcccttcccaccccttaaccctatgcttcctagtattataagcaaagactcaagtacaaaaagcatcatatcaacgcaaacagcaataccagcaacaactcctaccttccctgcatctgtcatcacttatgaaacccaaacagagagatctagagcacaaacaatacaaagagaacaggagcctcaaaagaagaacaggactgacccaaacatctctccagaccagagttctggcttcactacacccactgctatgacacctcctgttctaaccacagccgaaacttcagtcaagcccagtgtctctgcattcactcattccccaccagaaaacacaactgggatttcaagcacaatcagttttcattcaagaactcttaatctgacagatgtgattgaagaactagcccaagcaagtactcagactttgaagagcacaattgcttctgaaacaactttgtccagcaaatcacaccagagtaccacaactaggaaagcaatcattagacactcaaccataccaccattcttgagcagcagtgctactctaatgccagttcccatctcccctccctttactcagagagcagttactgacaacgtggcgactcccatttccgggcttatgacaaatacagtggtcaagctgcacgaatcctcaaggcacaatgctaaaccacagcaattagtagcagaggttgcaacatcccccaaggttcacccaaatgccaagttcacaattggaaccactcacttcatctactctaatctgttacattctactcccatgccagcactaacaacagttaaatcacagaattctaaattaactccatctccctgggcagaaaaccaattttggcacaaaccatactcagaaattgctgaaaaaggcaaaaagccagaagtaagcatgttggctactacaggcctgtccgaggccaccactcttgtttcagattgggatggacagaagaacacaaagaagagtgactttgataagaaaccagttcaagaagcaacaacttccaaactccttccctttgactctttgtctaggtatatatttgaaaagcccaggatagttggaggaaaagctgcaagttttactattccagctaactcagatgcctttcttccctgtgaagctgttggaaatcccctgcccaccattcattggaccagagtcccatcaggtatgtcaggacttgatttatctaagaggaaacagaatagcagggtccaggttctccccaatggtaccctgtccatccagagggtggaaattcaggaccgcggacagtacttgtgttccgcatccaatctgtttggcacagaccaccttcatgtcaccttgtctgtggtttcctatcctcccaggatcctggagagacgtaccaaagagatcacagttcattccggaagcactgtggaactgaagtgcagagcagaaggtaggccaagccctacagttacctggattcttgcaaaccaaacagttgtctcagaatcatcccagggaagtaggcaggctgtggtgacggttgacggaacattggtcctccacaatctcagtatttatgaccgtggcttttacaaatgtgtggccagcaacccaggtggccaggattcactgctggttaaaatacaagtcattgcagcaccacctgttattctagagcaaaggaggcaagtcattgtaggcacttggggtgaaagtttaaaactgccctgtactgcaaaaggaactcctcagcccagcgtttactgggtcctctctgatggcactgaagtgaaaccattacagtttaccaattccaagttgttcttattttcaaatgggactttgtatataagaaacctagcctcttcagacaggggcacttatgaatgcattgctaccagttccactggttcggagcgaagagtagtaatgcttacaatggaagagcgagtgaccagccccaggatagaagctgcatcccagaaaaggactgaagtgaattttggggacaaattactactgaactgctcagccactggggagcccaaaccccaaataatgtggaggttaccatccaaggctgtggtcgaccagcagcatagggtgggcagctggatccacgtctaccctaatggatccctgtttattggatcagtaacagaaaaagacagtggtgtctacttgtgtgtggcaagaaacaaaatgggggatgatctgatactgatgcatgttagcctaagactgaaacctgccaaaattgaccacaagcagtattttagaaagcaagtgctccatgggaaagatttccaagtagattgcaaagcttccggctccccagtgccagagatatcttggagtttgcctgatggaaccatgatcaacaatgcaatgcaagccgatgacagtggccacaggactaggagatatacccttttcaacaatggaactttatacttcaacaaagttggggtagcggaggaaggagattatacttgctatgcccagaacaccctagggaaagatgaaatgaaggtccacttaacagttataacagctgctccccggataaggcagagtaacaaaaccaacaagagaatcaaagctggagacacagctgtccttgactgtgaggtcactggggatcccaaaccaaaaatattttggttgctgccttccaatgacatgatttccttctccattgataggtacacatttcatgccaatgggtctttgaccatcaacaaagtgaaactgctcgattctggagagtacgtatgtgtagcccgaaatcccagtggggatgacaccaaaatgtacaaactggatgtggtctctaaacctccattaatcaatggtctgtatacaaacagaactgttattaaagccacagctgtgagacattccaaaaaacactttgactgcagagctgaagggacaccatctcctgaagtcatgtggatcatgccagacaatattttcctcacagccccatactatggaagcagaatcacagtccataaaaatggaaccttggaaattaggaatgtgaggctttcagattcagccgactttatctgtgtggcccgaaatgaaggtggagagagcgtgttggtagtacagttagaagtactggaaatgctgagaagaccgacatttagaaatccatttaatgaaaaaatagttgcccagctgggaaagtccacagcattgaattgctctgttgatggtaacccaccacctgaaataatctggattttaccaaatggcacacgattttccaatggaccacaaagttatcagtatctgatagcaagcaatggttcttttatcatttctaaaacaactcgggaggatgcaggaaaatatcgctgtgcagctaggaataaagttggctatattgagaaattagtcatattagaaattggccagaagccagttattcttacctatgcaccagggacagtaaaaggcatcagtggagaatctctatcactgcattgtgtgtctgatggaatccctaagccaaatatcaaatggactatgccaagtggttatgtagtagacaggcctcaaattaatgggaaatacatattgcatgacaatggcaccttagtcattaaagaagcaacagcttatgacagaggaaactatatctgtaaggctcaaaatagtgttggtcatacactgattactgttccagtaatgattgtagcctaccctccccgaattacaaatcgtccacccaggagtattgtcaccaggacaggggcagcctttcagctccactgtgtggccttgggagttcccaagccagaaatcacatgggagatgcctgaccactcccttctctcaacggcaagtaaagagaggacacatggaagtgagcagcttcacttacaaggtaccctagtcattcagaatccccaaacctccgattctgggatatacaaatgcacagcaaagaacccacttggtagtgattatgcagcaacgtatattcaagtaatctgacatgaaataataaagtc

SEQ ID NO: 738 - protein, 2617 aa, Homo sapiens
MKVKGRGITCLLVSFAVICLVATPGGKACPRRCACYMPTEVHCTFRYLTSIPDSIPPNVEHINLGYNSLVRLMETDFSGLTKLELLMLHSNGIHTIPDKTFSDLQALQVRLMVLKMSYNKVRKLQKDTFYGLRSLTRLHMDHNNIEFINPEVFYGLNFLRLVHLEGNQLTKLHPDTFVSLSYLQIFKISFIKFLYLSDNFLTSLPQEMVSYMPDLDSLYLHGNPWTCDCHLKWLSDWIQEKPGIYIVLPDVIKCKKDRSPSSAQQCPLCMNPRTSKGKPLAMVSAAAFQCAKPTIDSSLKSKSLTILEDSSSAFISPQGFMAPFGSLTLNMTDQSGNEANMVCSIQKPSRTSPIAFTEENDYIVLNTSFSTFLVCNIDYGHIQPVWQILALYSDSPLILERSHLLSETPQLYYKYKQVAPKPEDIFTNIEADLRADPSWLMQDQISLQLNRTATTFSTLQIQYSSDAQITLPRAEMRPVKHKWTMISRDNNTKLEHTVLVGGTVGLNCPGQGDPTPHVDWLLADGSKVRAPYVSEDGRILIDKSGKLELQMADSFDTGVYHCISSNYDDADILTYRITVVEPLVEAYQENGIHHTVFIGETLDLPCHSTGIPDASISWVIPGNNVLYQSSRDKKVLNNGTLRILQVTPKDQGYYRCVAANPSGVDFLIFQVSVKMKGQRPLEHDGETEGSGLDESNPIAHLKEPPGAQLRTSALMEAEVGKHTSSTSKRHNYRELTLQRRGDSTHRRFRENRRHFPPSARRIDPQHWAALLEKAKKNAMPDKRENTTVSPPPVVTQLPNIPGEEDDSSGMLALHEEFMVPATKALNLPARTVTADSRTISDSPMTNINYGTEFSPVVNSQILPPEEPTDFKLSTAIKTTAMSKNINPTMSSQIQGTTNQHSSTVFPLLLGATEFQDSDQMGRGREHFQSRPPITVRTMIKDVNVKMLSSTTNKLLLESVNTTNSHQTSVREVSEPRHNHFYSHTTQILSTSTFPSDPHTAAHSQFPIPRNSTVNIPLFRRFGRQRKIGGRGRIISPYRTPVLRRHRYSIFRSTTRGSSEKSTTAFSATVLNVTCLSCLPRERLTTATAALSFPSAAPITFPKADIARVPSEESTTLVQNPLLLLENKPSVEKTTPTIKYFRTEISQVTPTGAVMTYAPTSIPMEKTHKVNASYPRVSSTNEAKRDSVITSSLSGAITKPPMTIIAITRFSRRKIPWQQNFVNNHNPKGRLRNQHKVSLQKSTAVMLPKTSPALPQRQSLPSHHTTTKTHNPGSLPTKKELPFPPLNPMLPSIISKDSSTKSIISTQTAIPATTPTFPASVITYETQTERSRAQTIQREQEPQKKNRTDPNISPDQSSGFTTPTAMTPPVLTTAETSVKPSVSAFTHSPPENTTGISSTISFHSRTLNLTDVIEELAQASTQTLKSTIASETTLSSKSHQSTTTRKAIIRHSTIPPFLSSSATLMPVPISPPFTQRAVTDNVATPISGLMTNTVVKLHESSRHNAKPQQLVAEVATSPKVHPNAKFTIGTTHFIYSNLLHSTPMPALTTVKSQNSKLTPSPWAENQFWHKPYSEIAEKGKKPEVSMLATTGLSEATTLVSDWDGQKNTKKSDFDKKPVQEATTSKLLPFDSLSRYIFEKPRIVGGKAASFTIPANSDAFLPCEAVGNPLPTIHWTRVPSGMSGLDLSKRKQNSRVQVLPNGTLSIQRVEIQDRGQYLCSASNLFGTDHLHVTLSVVSYPPRILERRTKEITVHSGSTVELKCRAEGRPSPTVTWILANQTVVSESSQGSRQAVVTVDGTLVLHNLSIYDRGFYKCVASNPGGQDSLLVKIQVIAAPPVILEQRRQVIVGTWGESLKLPCTAKGTPQPSVYWVLSDGTEVKPLQFTNSKLFLFSNGTLYIRNLASSDRGTYECIATSSTGSERRVVMLTMEERVTSPRIEAASQKRTEVNFGDKLLLNCSATGEPKPQIMWRLPSKAVVDQQHRVGSWIHVYPNGSLFIGSVTEKDSGVYLCVARNKMGDDLILMHVSLRLKPAKIDHKQYFRKQVLHGKDFQVDCKASGSPVPEISWSLPDGTMINNAMQADDSGHRTRRYTLFNNGTLYFNKVGVAEEGDYTCYAQNTLGKDEMKVHLTVITAAPRIRQSNKTNKRIKAGDTAVLDCEVTGDPKPKIFWLLPSNDMISFSIDRYTFHANGSLTINKVKLLDSGEYVCVARNPSGDDTKMYKLDVVSKPPLINGLYTNRTVIKATAVRHSKKHFDCRAEGTPSPEVMWIMPDNIFLTAPYYGSRITVHKNGTLEIRNVRLSDSADFICVARNEGGESVLVVQLEVLEMLRRPTFRNPFNEKIVAQLGKSTALNCSVDGNPPPEIIWILPNGTRFSNGPQSYQYLIASNGSFIISKTTREDAGKYRCAARNKVGYIEKLVILEIGQKPVILTYAPGTVKGISGESLSLHCVSDGIPKPNIKWTMPSGYVVDRPQINGKYILHDNGTLVIKEATAYDRGNYICKAQNSVGHTLITVPVMIVAYPPRITNRPPRSIVTRTGAAFQLHCVALGVPKPEITWEMPDHSLLSTASKERTHGSEQLHLQGTLVIQNPQTSDSGIYKCTAKNPLGSDYAATYIQVI

SEQ ID NO: 739 - DNA, 7876 bp, Homo sapiens
  CDS (6)..(7856)
  misc_feature (746)..(746): Wherein n may be a, c, g or t
tcaggatgaaggtaaaaggcagaggaatcacctgcttgctggtctcctttgctgtgatctgcctggtcgccacccctgggggcaaggcctgtcctcgccgctgtgcctgttatatgcctacggaggtacactgcacatttcggtacctgacttccatcccagacagcatcccgcccaatgtggaacgcatcaatttagggtacaacagcttggttagattgatggaaacagatttttctggcctgaccaatctggagttactcatgcttcacagcaatggcattcacacaatccctgacaagaccttctcagatttgcaggccttgcaggtgagactgatggtcttaaaaatgagctataataaagtccgaaaacttcagaaagatactttttatggcctcaggagcttgacacgattgcacatggaccacaacaatattgagtttataaacccagaggttttttatgggctcaactttctccgcctggtgcacttggaaggaaatcagctcactaagctccacccagatacatttgtctctttgagctacctccagatatttaaaatctctttcattaagttcctatacttgtctgataacttcctgacctccctccctcaagagatggtctcctatatgcctgacctagacagcctttacctgcatggaaacccatggacctgtgattgccatttaaagtggttgtctgactggatacaggagaagccaggtatctatattgtnttaccagatgtaataaaatgcaaaaaagatagaagtccctctagtgctcagcagtgtccactttgcatgaaccctaggacttctaaaggcaagccgttagctatggtctcagctgcagctttccagtgtgccaagccaaccattgactcatccctgaaatcaaagagcctgactattctggaagacagtagttctgctttcatctctccccaaggtttcatggcaccctttggctccctcactttgaatatgacagatcagtctggaaatgaagctaacatggtctgcagtattcaaaagccctcaaggacatcacccattgcattcactgaagaaaatgactacatcgtgctaaatacttcattttcaacatttttggtgtgcaacatagattacggtcacattcagccagtgtggcaaattttggctttgtacagtgattctcctctgatactagaaaggagccacttgcttagtgaaacaccgcagctctattacaaatataaacaggtggctcctaagcctgaagacatttttaccaacatagaggcagatctcagagcagatccctcttggttaatgcaagaccaaatttccttgcagctgaacagaactgccaccacattcagtacattacagatccagtactccagtgatgctcaaatcactttaccaagagcagagatgaggccagtgaaacacaaatggactatgatttcaagggataacaatactaagctggaacatactgtcttggtaggtggaaccgttggcctgaactgcccaggccaaggagaccccaccccacacgtggattggcttctagctgatggaagtaaagtgagagccccttatgtcagtgaggatggacggatcctaatagacaaaagtggaaaattggaactccagatggctgatagttttgacacaggcgtatatcactgtataagcagcaattatgatgatgcagatattctcacctataggataactgtggtagaacctttggtcgaagcctatcaggaaaatgggattcatcacacagttttcattggtgaaacacttgatcttccatgccattctactggtatcccagatgcctctattagctgggttattccaggaaacaatgtgctctatcagtcatcaagagacaagaaagttctaaacaatggcacattaagaatattacaggtcaccccgaaagaccaaggttattatcgctgtgtggcagccaacccatcaggggttgattttttgattttccaagtttcagtcaagatgaaaggacaaaggcccttggagcatgatggagaaacagagggatctggacttgatgagtccaatcctattgctcatcttaaggagccaccaggtgcacaactccgtacatctgctctgatggaggctgaggttggaaaacacacctcaagcacaagtaagaggcacaactatcgggaattaacactccagcgacgtggagattcaacacatcgacgttttagggagaataggaggcatttccctccctctgctaggagaattgacccacaacattgggcggcactgttggagaaagctaaaaagaatgctatgccagacaagcgagaaaataccacagtgagcccacccccagtggtcacccaactcccaaacatacctggtgaagaagacgattcctcaggcatgctcgctctacatgaggaatttatggtcccggccactaaagctttgaaccttccagcaaggacagtgactgctgactccagaacaatatctgatagtcctatgacaaacataaattatggcacagaattctctcctgttgtgaattcacaaatactaccacctgaagaacccacagatttcaaactgtctactgctattaaaactacagccatgtcaaagaatataaacccaaccatgtcaagccaaatacaaggcacaaccaatcaacattcatccactgtctttccactgctacttggagcaactgaatttcaggactctgaccagatgggaagaggaagagagcatttccaaagtagacccccaataacagtaaggactatgatcaaagatgtcaatgtcaaaatgcttagtagcaccaccaacaaactattattagagtcagtaaataccacaaatagtcatcagacatctgtaagagaagtgagtgaacccaggcacaatcacttctattctcacactactcaaatacttagcacctccacgttcccttcagatccacacacagctgctcattctcagtttccgatccctagaaatagtacagttaacatcccgctgttcagacgctttgggaggcagaggaaaattggcggaagggggcggattatcagcccatatagaactccagttctgcgacggcatagatacagcattttcaggtcaacaaccagaggttcttctgaaaaaagcactactgcattctcagccacagtgctcaatgtgacatgtctgtcctgtcttcccagggagaggctcaccactgccacagcagcattgtcttttccaagtgctgctcccatcaccttccccaaagctgacattgctagagtcccatcagaagagtctacaactctagtccagaatccactattactacttgagaacaaacccagtgtagagaaaacaacacccacaataaaatatttcaggactgaaatttcccaagtgactccaactggtgcagtcatgacatatgctccaacatccatacccatggaaaaaactcacaaagtaaacgccagttacccacgtgtgtctagcaccaatgaagctaaaagagattcagtgattacatcgtcactttcaggtgctatcaccaagccaccaatgactattatagccattacaaggttttcaagaaggaaaattccctggcaacagaactttgtaaataaccataacccaaaaggcagattaaggaatcaacataaagttagtttacaaaaaagcacagctgtgatgcttcctaaaacatctcctgctttaccacagagacaaagtctcccctcgcaccacactacgaccaaaacacacaatcctggaagtcttccaacaaagaaggagcttcccttcccaccccttaaccctatgcttcctagtattataagcaaagactcaagtacaaaaagcatcatatcaacgcaaacagcaataccagcaacaactcctaccttccctgcatctgtcatcacttatgaaacccaaacagagagatctagagcacaaacaatacaaagagaacaggagcctcaaaagaagaacaggactgacccaaacatctctccagaccagagttctggcttcactacacccactgctatgacacctcctgttctaaccacagccgaaacttcagtcaagcccagtgtctctgcattcactcattccccaccagaaaacacaactgggatttcaagcacaatcagttttcattcaagaactcttaatctgacagatgtgattgaagaactagcccaagcaagtactcagactttgaagagcacaattgcttctgaaacaactttgtccagcaaatcacaccagagtaccacaactaggaaagcaatcattagacactcaaccataccaccattcttgagcagcagtgctactctaatgccagttcccatctcccctccctttactcagagagcagttactgacaacgtggcgactcccatttccgggcttatgacaaatacagtggtcaagctgcacgaatcctcaaggcacaatgctaaaccacagcaattagtagcagaggttgcaacatcccccaaggttcacccaaatgccaagttcacaattggaaccactcacttcatctactctaatctgttacattctactcccatgccagcactaacaacagttaaatcacagaattctaaattaactccatctccctgggcagaaaaccaattttggcacaaaccatactcagaaattgctgaaaaaggcaaaaagccagaagtaagcatgttggctactacaggcctgtccgaggccaccactcttgtttcagattgggatggacagaagaacacaaagaagagtgactttgataagaaaccagttcaagaagcaacaacttccaaactccttccctttgactctttgtctaggtatatatttgaaaagcccaggatagttggaggaaaagctgcaagttttactattccagctaactcagatgcctttcttccctgtgaagctgttggaaatcccctgcccaccattcattggaccagagtcccatcaggtatgtcaggacttgatttatctaagaggaaacagaatagcagggtccaggttctccccaatggtaccctgtccatccagagggtggaaattcaggaccgcggacagtacttgtgttccgcatccaatctgtttggcacagaccaccttcatgtcaccttgtctgtggtttcctatcctcccaggatcctggagagacgtaccaaagagatcacagttcattccggaagcactgtggaactgaagtgcagagcagaaggtaggccaagccctacagttacctggattcttgcaaaccaaacagttgtctcagaatcatcccagggaagtaggcaggctgtggtgacggttgacggaacattggtcctccacaatctcagtatttatgaccgtggcttttacaaatgtgtggccagcaacccaggtggccaggattcactgctggttaaaatacaagtcattgcagcaccacctgttattctagagcaaaggaggcaagtcattgtaggcacttggggtgaaagtttaaaactgccctgtactgcaaaaggaactcctcagcccagcgtttactgggtcctctctgatggcactgaagtgaaaccattacagtttaccaattccaagttgttcttattttcaaatgggactttgtatataagaaacctagcctcttcagacaggggcacttatgaatgcattgctaccagttccactggttcggagcgaagagtagtaatgcttacaatggaagagcgagtgaccagccccaggatagaagctgcatcccagaaaaggactgaagtgaattttggggacaaattactactgaactgctcagccactggggagcccaaaccccaaataatgtggaggttaccatccaaggctgtggtcgaccagcagcatagggtgggcagctggatccacgtctaccctaatggatccctgtttattggatcagtaacagaaaaagacagtggtgtctacttgtgtgtggcaagaaacaaaatgggggatgatctgatactgatgcatgttagcctaagactgaaacctgccaaaattgaccacaagcagtattttagaaagcaagtgctccatgggaaagatttccaagtagattgcaaagcttccggctccccagtgccagagatatcttggagtttgcctgatggaaccatgatcaacaatgcaatgcaagccgatgacagtggccacaggactaggagatatacccttttcaacaatggaactttatacttcaacaaagttggggtagcggaggaaggagattatacttgctatgcccagaacaccctagggaaagatgaaatgaaggtccacttaacagttataacagctgctccccggataaggcagagtaacaaaaccaacaagagaatcaaagctggagacacagctgtccttgactgtgaggtcactggggatcccaaaccaaaaatattttggttgctgccttccaatgacatgatttccttctccattgataggtacacatttcatgccaatgggtctttgaccatcaacaaagtgaaactgctcgattctggagagtacgtatgtgtagcccgaaatcccagtggggatgacaccaaaatgtacaaactggatgtggtctctaaacctccattaatcaatggtctgtatacaaacagaactgttattaaagccacagctgtgagacattccaaaaaacactttgactgcagagctgaagggacaccatctcctgaagtcatgtggatcatgccagacaatattttcctcacagccccatactatggaagcagaatcacagtccataaaaatggaaccttggaaattaggaatgtgaggctttcagattcagccgactttatctgtgtggcccgaaatgaaggtggagagagcgtgttggtagtacagttagaagtactggaaatgctgagaagaccgacatttagaaatccatttaatgaaaaaatagttgcccagctgggaaagtccacagcattgaattgctctgttgatggtaacccaccacctgaaataatctggattttaccaaatggcacacgattttccaatggaccacaaagttatcagtatctgatagcaagcaatggttcttttatcatttctaaaacaactcgggaggatgcaggaaaatatcgctgtgcagctaggaataaagttggctatattgagaaattagtcatattagaaattggccagaagccagttattcttacctatgcaccagggacagtaaaaggcatcagtggagaatctctatcactgcattgtgtgtctgatggaatccctaagccaaatatcaaatggactatgccaagtggttatgtagtagacaggcctcaaattaatgggaaatacatattgcatgacaatggcaccttagtcattaaagaagcaacagcttatgacagaggaaactatatctgtaaggctcaaaatagtgttggtcatacactgattactgttccagtaatgattgtagcctaccctccccgaattacaaatcgtccacccaggagtattgtcaccaggacaggggcagcctttcagctccactgtgtggccttgggagttcccaagccagaaatcacatgggagatgcctgaccactcccttctctcaacggcaagtaaagagaggacacatggaagtgagcagcttcacttacaaggtaccctagtcattcagaatccccaaacctccgattctgggatatacaaatgcacagcaaagaacccacttggtagtgattatgcagcaacgtatattcaagtaatctgacatgaaataataaagtc

SEQ ID NO: 740 - protein, 2617 aa, Homo sapiens
MKVKGRGITCLLVSFAVICLVATPGGKACPRRCACYMPTEVHCTFRYLTSIPDSIPPNVERINLGYNSLVRLMETDFSGLTNLELLMLHSNGIHTIPDKTFSDLQALQVRLMVLKMSYNKVRKLQKDTFYGLRSLTRLHMDHNNIEFINPEVFYGLNFLRLVHLEGNQLTKLHPDTFVSLSYLQIFKISFIKFLYLSDNFLTSLPQEMVSYMPDLDSLYLHGNPWTCDCHLKWLSDWIQEKPGIYIVLPDVIKCKKDRSPSSAQQCPLCMNPRTSKGKPLAMVSAAAFQCAKPTIDSSLKSKSLTILEDSSSAFISPQGFMAPFGSLTLNMTDQSGNEANMVCSIQKPSRTSPIAFTEENDYIVLNTSFSTFLVCNIDYGHIQPVWQILALYSDSPLILERSHLLSETPQLYYKYKQVAPKPEDIFTNIEADLRADPSWLMQDQISLQLNRTATTFSTLQIQYSSDAQITLPRAEMRPVKHKWTMISRDNNTKLEHTVLVGGTVGLNCPGQGDPTPHVDWLLADGSKVRAPYVSEDGRILIDKSGKLELQMADSFDTGVYHCISSNYDDADILTYRITVVEPLVEAYQENGIHHTVFIGETLDLPCHSTGIPDASISWVIPGNNVLYQSSRDKKVLNNGTLRILQVTPKDQGYYRCVAANPSGVDFLIFQVSVKMKGQRPLEHDGETEGSGLDESNPIAHLKEPPGAQLRTSALMEAEVGKHTSSTSKRHNYRELTLQRRGDSTHRRFRENRRHFPPSARRIDPQHWAALLEKAKKNAMPDKRENTTVSPPPVVTQLPNIPGEEDDSSGMLALHEEFMVPATKALNLPARTVTADSRTISDSPMTNINYGTEFSPVVNSQILPPEEPTDFKLSTAIKTTAMSKNINPTMSSQIQGTTNQHSSTVFPLLLGATEFQDSDQMGRGREHFQSRPPITVRTMIKDVNVKMLSSTTNKLLLESVNTTNSHQTSVREVSEPRHNHFYSHTTQILSTSTFPSDPHTAAHSQFPIPRNSTVNIPLFRRFGRQRKIGGRGRIISPYRTPVLRRHRYSIFRSTTRGSSEKSTTAFSATVLNVTCLSCLPRERLTTATAALSFPSAAPITFPKADIARVPSEESTTLVQNPLLLLENKPSVEKTTPTIKYFRTEISQVTPTGAVMTYAPTSIPMEKTHKVNASYPRVSSTNEAKRDSVITSSLSGAITKPPMTIIAITRFSRRKIPWQQNFVNNHNPKGRLRNQHKVSLQKSTAVMLPKTSPALPQRQSLPSHHTTTKTHNPGSLPTKKELPFPPLNPMLPSIISKDSSTKSIISTQTAIPATTPTFPASVITYETQTERSRAQTIQREQEPQKKNRTDPNISPDQSSGFTTPTAMTPPVLTTAETSVKPSVSAFTHSPPENTTGISSTISFHSRTLNLTDVIEELAQASTQTLKSTIASETTLSSKSHQSTTTRKAIIRHSTIPPFLSSSATLMPVPISPPFTQRAVTDNVATPISGLMTNTVVKLHESSRHNAKPQQLVAEVATSPKVHPNAKFTIGTTHFIYSNLLHSTPMPALTTVKSQNSKLTPSPWAENQFWHKPYSEIAEKGKKPEVSMLATTGLSEATTLVSDWDGQKNTKKSDFDKKPVQEATTSKLLPFDSLSRYIFEKPRIVGGKAASFTIPANSDAFLPCEAVGNPLPTIHWTRVPSGMSGLDLSKRKQNSRVQVLPNGTLSIQRVEIQDRGQYLCSASNLFGTDHLHVTLSVVSYPPRILERRTKEITVHSGSTVELKCRAEGRPSPTVTWILANQTVVSESSQGSRQAVVTVDGTLVLHNLSIYDRGFYKCVASNPGGQDSLLVKIQVIAAPPVILEQRRQVIVGTWGESLKLPCTAKGTPQPSVYWVLSDGTEVKPLQFTNSKLFLFSNGTLYIRNLASSDRGTYECIATSSTGSERRVVMLTMEERVTSPRIEAASQKRTEVNFGDKLLLNCSATGEPKPQIMWRLPSKAVVDQQHRVGSWIHVYPNGSLFIGSVTEKDSGVYLCVARNKMGDDLILMHVSLRLKPAKIDHKQYFRKQVLHGKDFQVDCKASGSPVPEISWSLPDGTMINNAMQADDSGHRTRRYTLFNNGTLYFNKVGVAEEGDYTCYAQNTLGKDEMKVHLTVITAAPRIRQSNKTNKRIKAGDTAVLDCEVTGDPKPKIFWLLPSNDMISFSIDRYTFHANGSLTINKVKLLDSGEYVCVARNPSGDDTKMYKLDVVSKPPLINGLYTNRTVIKATAVRHSKKHFDCRAEGTPSPEVMWIMPDNIFLTAPYYGSRITVHKNGTLEIRNVRLSDSADFICVARNEGGESVLVVQLEVLEMLRRPTFRNPFNEKIVAQLGKSTALNCSVDGNPPPEIIWILPNGTRFSNGPQSYQYLIASNGSFIISKTTREDAGKYRCAARNKVGYIEKLVILEIGQKPVILTYAPGTVKGISGESLSLHCVSDGIPKPNIKWTMPSGYVVDRPQINGKYILHDNGTLVIKEATAYDRGNYICKAQNSVGHTLITVPVMIVAYPPRITNRPPRSIVTRTGAAFQLHCVALGVPKPEITWEMPDHSLLSTASKERTHGSEQLHLQGTLVIQNPQTSDSGIYKCTAKNPLGSDYAATYIQVI

SEQ ID NO: 741 - DNA, 7876 bp, Homo sapiens
  CDS (6)..(7856)
  misc_feature (746)..(746): Wherein n may be a, c, g or t
tcaggatgaaggtaaaaggcagaggaatcacctgcttgctggtctcctttgctgtgatctgcctggtcgccacccctgggggcaaggcctgtcctcgccgctgtgcctgttatatgcctacggaggtacactgcacatttcggtacctgacttccatcccagacagcatcccgcccaatgtggaacgcatcaatttagggtacaacagcttggttagattgatggaaacagatttttctggcctgaccaaactggagttactcatgcttcacagcaatggcattcacacaatccctgacaagaccttctcagatttgcaggccttgcaggtgagactgatggtcttaaaaatgagctataataaagtccgaaaacttcagaaagatactttttatggcctcaggagcttgacacgattgcacatggaccacaacaatattgagtttataaacccagaggttttttatgggctcaactttctccgcctggtgcgcttggaaggaaatcagctcactaagctccacccagatacatttgtctctttgagctacctccagatatttaaaatctctttcattaagttcctatacttgtctgataacttcctgacctccctccctcaagagatggtctcctatatgcctgacctagacagcctttacctgcatggaaacccatggacctgtgattgccatttaaagtggttgtctgactggatacaggagaagccaggtatctatattgtnttaccagatgtaataaaatgcaaaaaagatagaagtccctctagtgctcagcagtgtccactttgcatgaaccctaggacttctaaaggcaagccgttagctatggtctcagctgcagctttccagtgtgccaagccaaccattgactcatccctgaaatcaaagagcctgactattctggaagacagtagttctgctttcatctctccccaaggtttcatggcaccctttggctccctcactttgaatatgacagatcagtctggaaatgaagctaacatggtctgcagtattcaaaagccctcaaggacatcacccattgcattcactgaagaaaatgactacatcgtgctaaatacttcattttcaacatttttggtgtgcaacatagattacggtcacattcagccagtgtggcaaattttggctttgtacagtgattctcctctgatactagaaaggagccacttgcttagtgaaacaccgcagctctattacaaatataaacaggtggctcctaagcctgaagacatttttaccaacatagaggcagatctcagagcagatccctcttggttaatgcaagaccaaatttccttgcagctgaacagaactgccaccacattcagtacattacagatccagtactccagtgatgctcaaatcactttaccaagagcagagatgaggccagtgaaacacaaatggactatgatttcaagggataacaatactaagctggaacatactgtcttggtaggtggaaccgttggcctgaactgcccaggccaaggagaccccaccccacacgtggattggcttctagctgatggaagtaaagtgagagccccttatgtcagtgaggatggacggatcctaatagacaaaagtggaaaattggaactccagatggctgatagttttgacacaggcgtatatcactgtataagcagcaattatgatgatgcagatattctcacctataggataactgtggtagaacctttggtcgaagcctatcaggaaaatgggattcatcacacagttttcattggtgaaacacttgatcttccatgccattctactggtatcccagatgcctctattagctgggttattccaggaaacaatgtgctctatcagtcatcaagagacaagaaagttctaaacaatggcacattaagaatattacaggtcaccccgaaagaccaaggttattatcgctgtgtggcagccaacccatcaggggttgattttttgattttccaagtttcagtcaagatgaaaggacaaaggcccttggagcatgatggagaaacagagggatctggacttgatgagtccaatcctattgctcatcttaaggagccaccaggtgcacaactccgtacatctgctctgatggaggctgaggttggaaaacacacctcaagcacaagtaagaggcacaactatcgggaattaacactccagcgacgtggagattcaacacatcgacgttttagggagaataggaggcatttccctccctctgctaggagaattgacccacaacattgggcggcactgttggagaaagctaaaaagaatgctatgccagacaagcgagaaaataccacagtgagcccacccccagtggtcacccaactcccaaacatacctggtgaagaagacgattcctcaggcatgctcgctctacatgaggaatttatggtcccggccactaaagctttgaaccttccagcaaggacagtgactgctgactccagaacaatatctgatagtcctatgacaaacataaattatggcacagaattctctcctgttgtgaattcacaaatactaccacctgaagaacccacagatttcaaactgtctactgctattaaaactacagccatgtcaaagaatataaacccaaccatgtcaagccaaatacaaggcacaaccaatcaacattcatccactgtctttccactgctacttggagcaactgaatttcaggactctgaccagatgggaagaggaagagagcatttccaaagtagacccccaataacagtaaggactatgatcaaagatgtcaatgtcaaaatgcttagtagcaccaccaacaaactattattagagtcagtaaataccacaaatagtcatcagacatctgtaagagaagtgagtgaacccaggcacaatcacttctattctcacactactcaaatacttagcacctccacgttcccttcagatccacacacagctgctcattctcagtttccgatccctagaaatagtacagttaacatcccgctgttcagacgctttgggaggcagaggaaaattggcggaagggggcggattatcagcccatatagaactccagttctgcgacggcatagatacagcattttcaggtcaacaaccagaggttcttctgaaaaaagcactactgcattctcagccacagtgctcaatgtgacatgtctgtcctgtcttcccagggagaggctcaccactgccacagcagcattgtcttttccaagtgctgctcccatcaccttccccaaagctgacattgctagagtcccatcagaagagtctacaactctagtccagaatccactattactacttgagaacaaacccagtgtagagaaaacaacacccacaataaaatatttcaggactgaaatttcccaagtgactccaactggtgcagtcatgacatatgctccaacatccatacccatggaaaaaactcacaaagtaaacgccagttacccacgtgtgtctagcaccaatgaagctaaaagagattcagtgattacatcgtcactttcaggtgctatcaccaagccaccaatgactattatagccattacaaggttttcaagaaggaaaattccctggcaacagaactttgtaaataaccataacccaaaaggcagattaaggaatcaacataaagttagtttacaaaaaagcacagctgtgatgcttcctaaaacatctcctgctttaccacagagacaaagtctcccctcgcaccacactacgaccaaaacacacaatcctggaagtcttccaacaaagaaggagcttcccttcccaccccttaaccctatgcttcctagtattataagcaaagactcaagtacaaaaagcatcatatcaacgcaaacagcaataccagcaacaactcctaccttccctgcatctgtcatcacttatgaaacccaaacagagagatctagagcacaaacaatacaaagagaacaggagcctcaaaagaagaacaggactgacccaaacatctctccagaccagagttctggcttcactacacccactgctatgacacctcctgttctaaccacagccgaaacttcagtcaagcccagtgtctctgcattcactcattccccaccagaaaacacaactgggatttcaagcacaatcagttttcattcaagaactcttaatctgacagatgtgattgaagaactagcccaagcaagtactcagactttgaagagcacaattgcttctgaaacaactttgtccagcaaatcacaccagagtaccacaactaggaaagcaatcattagacactcaaccataccaccattcttgagcagcagtgctactctaatgccagttcccatctcccctccctttactcagagagcagttactgacaacgtggcgactcccatttccgggcttatgacaaatacagtggtcaagctgcacgaatcctcaaggcacaatgctaaaccacagcaattagtagcagaggttgcaacatcccccaaggttcacccaaatgccaagttcacaattggaaccactcacttcatctactctaatctgttacattctactcccatgccagcactaacaacagttaaatcacagaattctaaattaactccatctccctgggcagaaaaccaattttggcacaaaccatactcagaaattgctgaaaaaggcaaaaagccagaagtaagcatgttggctactacaggcctgtccgaggccaccactcttgtttcagattgggatggacagaagaacacaaagaagagtgactttgataagaaaccagttcaagaagcaacaacttccaaactccttccctttgactctttgtctaggtatatatttgaaaagcccaggatagttggaggaaaagctgcaagttttactattccagctaactcagatgcctttcttccctgtgaagctgttggaaatcccctgcccaccattcattggaccagagtcccatcaggtatgtcaggacttgatttatctaagaggaaacagaatagcagggtccaggttctccccaatggtaccctgtccatccagagggtggaaattcaggaccgcggacagtacttgtgttccgcatccaatctgtttggcacagaccaccttcatgtcaccttgtctgtggtttcctatcctcccaggatcctggagagacgtaccaaagagatcacagttcattccggaagcactgtggaactgaagtgcagagcagaaggtaggccaagccctacagttacctggattcttgcaaaccaaacagttgtctcagaatcatcccagggaagtaggcaggctgtggtgacggttgacggaacattggtcctccacaatctcagtatttatgaccgtggcttttacaaatgtgtggccagcaacccaggtggccaggattcactgctggttaaaatacaagtcattgcagcaccacctgttattctagagcaaaggaggcaagtcattgtaggcacttggggtgaaagtttaaaactgccctgtactgcaaaaggaactcctcagcccagcgtttactgggtcctctctgatggcactgaagtgaaaccattacagtttaccaattccaagttgttcttattttcaaatgggactttgtatataagaaacctagcctcttcagacaggggcacttatgaatgcattgctaccagttccactggttcggagcgaagagtagtaatgcttacaatggaagagcgagtgaccagccccaggatagaagctgcatcccagaaaaggactgaagtgaattttggggacaaattactactgaactgctcagccactggggagcccaaaccccaaataatgtggaggttaccatccaaggctgtggtcgaccagcagcatagggtgggcagctggatccacgtctaccctaatggatccctgtttattggatcagtaacagaaaaagacagtggtgtctacttgtgtgtggcaagaaacaaaatgggggatgatctgatactgatgcatgttagcctaagactgaaacctgccaaaattgaccacaagcagtattttagaaagcaagtgctccatgggaaagatttccaagtagattgcaaagcttccggctccccagtgccagagatatcttggagtttgcctgatggaaccatgatcaacaatgcaatgcaagccgatgacagtggccacaggactaggagatatacccttttcaacaatggaactttatacttcaacaaagttggggtagcggaggaaggagattatacttgctatgcccagaacaccctagggaaagatgaaatgaaggtccacttaacagttataacagctgctccccggataaggcagagtaacaaaaccaacaagagaatcaaagctggagacacagctgtccttgactgtgaggtcactggggatcccaaaccaaaaatattttggttgctgccttccaatgacatgatttccttctccattgataggtacacatttcatgccaatgggtctttgaccatcaacaaagtgaaactgctcgattctggagagtacgtatgtgtagcccgaaatcccagtggggatgacaccaaaatgtacaaactggatgtggtctctaaacctccattaatcaatggtctgtatacaaacagaactgttattaaagccacagctgtgagacattccaaaaaacactttgactgcagagctgaagggacaccatctcctgaagtcatgtggatcatgccagacaatattttcctcacagccccatactatggaagcagaatcacagtccataaaaatggaaccttggaaattaggaatgtgaggctttcagattcagccgactttatctgtgtggcccgaaatgaaggtggagagagcgtgttggtagtacagttagaagtactggaaatgctgagaagaccgacatttagaaatccatttaatgaaaaaatagttgcccagctgggaaagtccacagcattgaattgctctgttgatggtaacccaccacctgaaataatctggattttaccaaatggcacacgattttccaatggaccacaaagttatcagtatctgatagcaagcaatggttcttttatcatttctaaaacaactcgggaggatgcaggaaaatatcgctgtgcagctaggaataaagttggctatattgagaaattagtcatattagaaattggccagaagccagttattcttacctatgcaccagggacagtaaaaggcatcagtggagaatctctatcactgcattgtgtgtctgatggaatccctaagccaaatatcaaatggactatgccaagtggttatgtagtagacaggcctcaaattaatgggaaatacatattgcatgacaatggcaccttagtcattaaagaagcaacagcttatgacagaggaaactatatctgtaaggctcaaaatagtgttggtcatacactgattactgttccagtaatgattgtagcctaccctccccgaattacaaatcgtccacccaggagtattgtcaccaggacaggggcagcctttcagctccactgtgtggccttgggagttcccaagccagaaatcacatgggagatgcctgaccactcccttctctcaacggcaagtaaagagaggacacatggaagtgagcagcttcacttacaaggtaccctagtcattcagaatccccaaacctccgattctgggatatacaaatgcacagcaaagaacccacttggtagtgattatgcagcaacgtatattcaagtaatctgacatgaaataataaagtc

SEQ ID NO: 742 - protein, 2617 aa, Homo sapiens
MKVKGRGITCLLVSFAVICLVATPGGKACPRRCACYMPTEVHCTFRYLTSIPDSIPPNVERINLGYNSLVRLMETDFSGLTKLELLMLHSNGIHTIPDKTFSDLQALQVRLMVLKMSYNKVRKLQKDTFYGLRSLTRLHMDHNNIEFINPEVFYGLNFLRLVRLEGNQLTKLHPDTFVSLSYLQIFKISFIKFLYLSDNFLTSLPQEMVSYMPDLDSLYLHGNPWTCDCHLKWLSDWIQEKPGIYIVLPDVIKCKKDRSPSSAQQCPLCMNPRTSKGKPLAMVSAAAFQCAKPTIDSSLKSKSLTILEDSSSAFISPQGFMAPFGSLTLNMTDQSGNEANMVCSIQKPSRTSPIAFTEENDYIVLNTSFSTFLVCNIDYGHIQPVWQILALYSDSPLILERSHLLSETPQLYYKYKQVAPKPEDIFTNIEADLRADPSWLMQDQISLQLNRTATTFSTLQIQYSSDAQITLPRAEMRPVKHKWTMISRDNNTKLEHTVLVGGTVGLNCPGQGDPTPHVDWLLADGSKVRAPYVSEDGRILIDKSGKLELQMADSFDTGVYHCISSNYDDADILTYRITVVEPLVEAYQENGIHHTVFIGETLDLPCHSTGIPDASISWVIPGNNVLYQSSRDKKVLNNGTLRILQVTPKDQGYYRCVAANPSGVDFLIFQVSVKMKGQRPLEHDGETEGSGLDESNPIAHLKEPPGAQLRTSALMEAEVGKHTSSTSKRHNYRELTLQRRGDSTHRRFRENRRHFPPSARRIDPQHWAALLEKAKKNAMPDKRENTTVSPPPVVTQLPNIPGEEDDSSGMLALHEEFMVPATKALNLPARTVTADSRTISDSPMTNINYGTEFSPVVNSQILPPEEPTDFKLSTAIKTTAMSKNINPTMSSQIQGTTNQHSSTVFPLLLGATEFQDSDQMGRGREHFQSRPPITVRTMIKDVNVKMLSSTTNKLLLESVNTTNSHQTSVREVSEPRHNHFYSHTTQILSTSTFPSDPHTAAHSQFPIPRNSTVNIPLFRRFGRQRKIGGRGRIISPYRTPVLRRHRYSIFRSTTRGSSEKSTTAFSATVLNVTCLSCLPRERLTTATAALSFPSAAPITFPKADIARVPSEESTTLVQNPLLLLENKPSVEKTTPTIKYFRTEISQVTPTGAVMTYAPTSIPMEKTHKVNASYPRVSSTNEAKRDSVITSSLSGAITKPPMTIIAITRFSRRKIPWQQNFVNNHNPKGRLRNQHKVSLQKSTAVMLPKTSPALPQRQSLPSHHTTTKTHNPGSLPTKKELPFPPLNPMLPSIISKDSSTKSIISTQTAIPATTPTFPASVITYETQTERSRAQTIQREQEPQKKNRTDPNISPDQSSGFTTPTAMTPPVLTTAETSVKPSVSAFTHSPPENTTGISSTISFHSRTLNLTDVIEELAQASTQTLKSTIASETTLSSKSHQSTTTRKAIIRHSTIPPFLSSSATLMPVPISPPFTQRAVTDNVATPISGLMTNTVVKLHESSRHNAKPQQLVAEVATSPKVHPNAKFTIGTTHFIYSNLLHSTPMPALTTVKSQNSKLTPSPWAENQFWHKPYSEIAEKGKKPEVSMLATTGLSEATTLVSDWDGQKNTKKSDFDKKPVQEATTSKLLPFDSLSRYIFEKPRIVGGKAASFTIPANSDAFLPCEAVGNPLPTIHWTRVPSGMSGLDLSKRKQNSRVQVLPNGTLSIQRVEIQDRGQYLCSASNLFGTDHLHVTLSVVSYPPRILERRTKEITVHSGSTVELKCRAEGRPSPTVTWILANQTVVSESSQGSRQAVVTVDGTLVLHNLSIYDRGFYKCVASNPGGQDSLLVKIQVIAAPPVILEQRRQVIVGTWGESLKLPCTAKGTPQPSVYWVLSDGTEVKPLQFTNSKLFLFSNGTLYIRNLASSDRGTYECIATSSTGSERRVVMLTMEERVTSPRIEAASQKRTEVNFGDKLLLNCSATGEPKPQIMWRLPSKAVVDQQHRVGSWIHVYPNGSLFIGSVTEKDSGVYLCVARNKMGDDLILMHVSLRLKPAKIDHKQYFRKQVLHGKDFQVDCKASGSPVPEISWSLPDGTMINNAMQADDSGHRTRRYTLFNNGTLYFNKVGVAEEGDYTCYAQNTLGKDEMKVHLTVITAAPRIRQSNKTNKRIKAGDTAVLDCEVTGDPKPKIFWLLPSNDMISFSIDRYTFHANGSLTINKVKLLDSGEYVCVARNPSGDDTKMYKLDVVSKPPLINGLYTNRTVIKATAVRHSKKHFDCRAEGTPSPEVMWIMPDNIFLTAPYYGSRITVHKNGTLEIRNVRLSDSADFICVARNEGGESVLVVQLEVLEMLRRPTFRNPFNEKIVAQLGKSTALNCSVDGNPPPEIIWILPNGTRFSNGPQSYQYLIASNGSFIISKTTREDAGKYRCAARNKVGYIEKLVILEIGQKPVILTYAPGTVKGISGESLSLHCVSDGIPKPNIKWTMPSGYVVDRPQINGKYILHDNGTLVIKEATAYDRGNYICKAQNSVGHTLITVPVMIVAYPPRITNRPPRSIVTRTGAAFQLHCVALGVPKPEITWEMPDHSLLSTASKERTHGSEQLHLQGTLVIQNPQTSDSGIYKCTAKNPLGSDYAATYIQVI

SEQ ID NO: 743 - DNA, 7876 bp, Homo sapiens
  CDS (6)..(7856)
  misc_feature (746)..(746): Wherein n may be a, c, g or t
tcaggatgaaggtaaaaggcagaggaatcacctgcttgctggtctcctttgctgtgatctgcctggtcgccacccctgggggcaaggcctgtcctcgccgctgtgcctgttatatgcctacggaggtacactgcacatttcggtacctgacttccatcccagacagcatcccgcccaatgtggaacgcatcaatttagggtacaacagcttggttagattgatggaaacagatttttctggcctgaccaaactggagttactcatgcttcacagcaatggcattcacacaatccctgacaagaccttctcagatttgcaggccttgcaggtgagactgatggtcttaaaaatgagctataataaagtccgaaaacttcagaaagatactttttatggcctcaggagcttgacacgattgcacatggaccacaacaatattgagtttataaacccagaggttttttatgggctcaactttctccgcctggtgcacttggaaggaaatcagctcactaagctccacccagatacatttgtctctttgaactacctccagatatttaaaatctctttcattaagttcctatacttgtctgataacttcctgacctccctccctcaagagatggtctcctatatgcctgacctagacagcctttacctgcatggaaacccatggacctgtgattgccatttaaagtggttgtctgactggatacaggagaagccaggtatctatattgtnttaccagatgtaataaaatgcaaaaaagatagaagtccctctagtgctcagcagtgtccactttgcatgaaccctaggacttctaaaggcaagccgttagctatggtctcagctgcagctttccagtgtgccaagccaaccattgactcatccctgaaatcaaagagcctgactattctggaagacagtagttctgctttcatctctccccaaggtttcatggcaccctttggctccctcactttgaatatgacagatcagtctggaaatgaagctaacatggtctgcagtattcaaaagccctcaaggacatcacccattgcattcactgaagaaaatgactacatcgtgctaaatacttcattttcaacatttttggtgtgcaacatagattacggtcacattcagccagtgtggcaaattttggctttgtacagtgattctcctctgatactagaaaggagccacttgcttagtgaaacaccgcagctctattacaaatataaacaggtggctcctaagcctgaagacatttttaccaacatagaggcagatctcagagcagatccctcttggttaatgcaagaccaaatttccttgcagctgaacagaactgccaccacattcagtacattacagatccagtactccagtgatgctcaaatcactttaccaagagcagagatgaggccagtgaaacacaaatggactatgatttcaagggataacaatactaagctggaacatactgtcttggtaggtggaaccgttggcctgaactgcccaggccaaggagaccccaccccacacgtggattggcttctagctgatggaagtaaagtgagagccccttatgtcagtgaggatggacggatcctaatagacaaaagtggaaaattggaactccagatggctgatagttttgacacaggcgtatatcactgtataagcagcaattatgatgatgcagatattctcacctataggataactgtggtagaacctttggtcgaagcctatcaggaaaatgggattcatcacacagttttcattggtgaaacacttgatcttccatgccattctactggtatcccagatgcctctattagctgggttattccaggaaacaatgtgctctatcagtcatcaagagacaagaaagttctaaacaatggcacattaagaatattacaggtcaccccgaaagaccaaggttattatcgctgtgtggcagccaacccatcaggggttgattttttgattttccaagtttcagtcaagatgaaaggacaaaggcccttggagcatgatggagaaacagagggatctggacttgatgagtccaatcctattgctcatcttaaggagccaccaggtgcacaactccgtacatctgctctgatggaggctgaggttggaaaacacacctcaagcacaagtaagaggcacaactatcgggaattaacactccagcgacgtggagattcaacacatcgacgttttagggagaataggaggcatttccctccctctgctaggagaattgacccacaacattgggcggcactgttggagaaagctaaaaagaatgctatgccagacaagcgagaaaataccacagtgagcccacccccagtggtcacccaactcccaaacatacctggtgaagaagacgattcctcaggcatgctcgctctacatgaggaatttatggtcccggccactaaagctttgaaccttccagcaaggacagtgactgctgactccagaacaatatctgatagtcctatgacaaacataaattatggcacagaattctctcctgttgtgaattcacaaatactaccacctgaagaacccacagatttcaaactgtctactgctattaaaactacagccatgtcaaagaatataaacccaaccatgtcaagccaaatacaaggcacaaccaatcaacattcatccactgtctttccactgctacttggagcaactgaatttcaggactctgaccagatgggaagaggaagagagcatttccaaagtagacccccaataacagtaaggactatgatcaaagatgtcaatgtcaaaatgcttagtagcaccaccaacaaactattattagagtcagtaaataccacaaatagtcatcagacatctgtaagagaagtgagtgaacccaggcacaatcacttctattctcacactactcaaatacttagcacctccacgttcccttcagatccacacacagctgctcattctcagtttccgatccctagaaatagtacagttaacatcccgctgttcagacgctttgggaggcagaggaaaattggcggaagggggcggattatcagcccatatagaactccagttctgcgacggcatagatacagcattttcaggtcaacaaccagaggttcttctgaaaaaagcactactgcattctcagccacagtgctcaatgtgacatgtctgtcctgtcttcccagggagaggctcaccactgccacagcagcattgtcttttccaagtgctgctcccatcaccttccccaaagctgacattgctagagtcccatcagaagagtctacaactctagtccagaatccactattactacttgagaacaaacccagtgtagagaaaacaacacccacaataaaatatttcaggactgaaatttcccaagtgactccaactggtgcagtcatgacatatgctccaacatccatacccatggaaaaaactcacaaagtaaacgccagttacccacgtgtgtctagcaccaatgaagctaaaagagattcagtgattacatcgtcactttcaggtgctatcaccaagccaccaatgactattatagccattacaaggttttcaagaaggaaaattccctggcaacagaactttgtaaataaccataacccaaaaggcagattaaggaatcaacataaagttagtttacaaaaaagcacagctgtgatgcttcctaaaacatctcctgctttaccacagagacaaagtctcccctcgcaccacactacgaccaaaacacacaatcctggaagtcttccaacaaagaaggagcttcccttcccaccccttaaccctatgcttcctagtattataagcaaagactcaagtacaaaaagcatcatatcaacgcaaacagcaataccagcaacaactcctaccttccctgcatctgtcatcacttatgaaacccaaacagagagatctagagcacaaacaatacaaagagaacaggagcctcaaaagaagaacaggactgacccaaacatctctccagaccagagttctggcttcactacacccactgctatgacacctcctgttctaaccacagccgaaacttcagtcaagcccagtgtctctgcattcactcattccccaccagaaaacacaactgggatttcaagcacaatcagttttcattcaagaactcttaatctgacagatgtgattgaagaactagcccaagcaagtactcagactttgaagagcacaattgcttctgaaacaactttgtccagcaaatcacaccagagtaccacaactaggaaagcaatcattagacactcaaccataccaccattcttgagcagcagtgctactctaatgccagttcccatctcccctccctttactcagagagcagttactgacaacgtggcgactcccatttccgggcttatgacaaatacagtggtcaagctgcacgaatcctcaaggcacaatgctaaaccacagcaattagtagcagaggttgcaacatcccccaaggttcacccaaatgccaagttcacaattggaaccactcacttcatctactctaatctgttacattctactcccatgccagcactaacaacagttaaatcacagaattctaaattaactccatctccctgggcagaaaaccaattttggcacaaaccatactcagaaattgctgaaaaaggcaaaaagccagaagtaagcatgttggctactacaggcctgtccgaggccaccactcttgtttcagattgggatggacagaagaacacaaagaagagtgactttgataagaaaccagttcaagaagcaacaacttccaaactccttccctttgactctttgtctaggtatatatttgaaaagcccaggatagttggaggaaaagctgcaagttttactattccagctaactcagatgcctttcttccctgtgaagctgttggaaatcccctgcccaccattcattggaccagagtcccatcaggtatgtcaggacttgatttatctaagaggaaacagaatagcagggtccaggttctccccaatggtaccctgtccatccagagggtggaaattcaggaccgcggacagtacttgtgttccgcatccaatctgtttggcacagaccaccttcatgtcaccttgtctgtggtttcctatcctcccaggatcctggagagacgtaccaaagagatcacagttcattccggaagcactgtggaactgaagtgcagagcagaaggtaggccaagccctacagttacctggattcttgcaaaccaaacagttgtctcagaatcatcccagggaagtaggcaggctgtggtgacggttgacggaacattggtcctccacaatctcagtatttatgaccgtggcttttacaaatgtgtggccagcaacccaggtggccaggattcactgctggttaaaatacaagtcattgcagcaccacctgttattctagagcaaaggaggcaagtcattgtaggcacttggggtgaaagtttaaaactgccctgtactgcaaaaggaactcctcagcccagcgtttactgggtcctctctgatggcactgaagtgaaaccattacagtttaccaattccaagttgttcttattttcaaatgggactttgtatataagaaacctagcctcttcagacaggggcacttatgaatgcattgctaccagttccactggttcggagcgaagagtagtaatgcttacaatggaagagcgagtgaccagccccaggatagaagctgcatcccagaaaaggactgaagtgaattttggggacaaattactactgaactgctcagccactggggagcccaaaccccaaataatgtggaggttaccatccaaggctgtggtcgaccagcagcatagggtgggcagctggatccacgtctaccctaatggatccctgtttattggatcagtaacagaaaaagacagtggtgtctacttgtgtgtggcaagaaacaaaatgggggatgatctgatactgatgcatgttagcctaagactgaaacctgccaaaattgaccacaagcagtattttagaaagcaagtgctccatgggaaagatttccaagtagattgcaaagcttccggctccccagtgccagagatatcttggagtttgcctgatggaaccatgatcaacaatgcaatgcaagccgatgacagtggccacaggactaggagatatacccttttcaacaatggaactttatacttcaacaaagttggggtagcggaggaaggagattatacttgctatgcccagaacaccctagggaaagatgaaatgaaggtccacttaacagttataacagctgctccccggataaggcagagtaacaaaaccaacaagagaatcaaagctggagacacagctgtccttgactgtgaggtcactggggatcccaaaccaaaaatattttggttgctgccttccaatgacatgatttccttctccattgataggtacacatttcatgccaatgggtctttgaccatcaacaaagtgaaactgctcgattctggagagtacgtatgtgtagcccgaaatcccagtggggatgacaccaaaatgtacaaactggatgtggtctctaaacctccattaatcaatggtctgtatacaaacagaactgttattaaagccacagctgtgagacattccaaaaaacactttgactgcagagctgaagggacaccatctcctgaagtcatgtggatcatgccagacaatattttcctcacagccccatactatggaagcagaatcacagtccataaaaatggaaccttggaaattaggaatgtgaggctttcagattcagccgactttatctgtgtggcccgaaatgaaggtggagagagcgtgttggtagtacagttagaagtactggaaatgctgagaagaccgacatttagaaatccatttaatgaaaaaatagttgcccagctgggaaagtccacagcattgaattgctctgttgatggtaacccaccacctgaaataatctggattttaccaaatggcacacgattttccaatggaccacaaagttatcagtatctgatagcaagcaatggttcttttatcatttctaaaacaactcgggaggatgcaggaaaatatcgctgtgcagctaggaataaagttggctatattgagaaattagtcatattagaaattggccagaagccagttattcttacctatgcaccagggacagtaaaaggcatcagtggagaatctctatcactgcattgtgtgtctgatggaatccctaagccaaatatcaaatggactatgccaagtggttatgtagtagacaggcctcaaattaatgggaaatacatattgcatgacaatggcaccttagtcattaaagaagcaacagcttatgacagaggaaactatatctgtaaggctcaaaatagtgttggtcatacactgattactgttccagtaatgattgtagcctaccctccccgaattacaaatcgtccacccaggagtattgtcaccaggacaggggcagcctttcagctccactgtgtggccttgggagttcccaagccagaaatcacatgggagatgcctgaccactcccttctctcaacggcaagtaaagagaggacacatggaagtgagcagcttcacttacaaggtaccctagtcattcagaatccccaaacctccgattctgggatatacaaatgcacagcaaagaacccacttggtagtgattatgcagcaacgtatattcaagtaatctgacatgaaataataaagtc

SEQ ID NO: 744 - protein, 2617 aa, Homo sapiens
MKVKGRGITCLLVSFAVICLVATPGGKACPRRCACYMPTEVHCTFRYLTSIPDSIPPNVERINLGYNSLVRLMETDFSGLTKLELLMLHSNGIHTIPDKTFSDLQALQVRLMVLKMSYNKVRKLQKDTFYGLRSLTRLHMDHNNIEFINPEVFYGLNFLRLVHLEGNQLTKLHPDTFVSLNYLQIFKISFIKFLYLSDNFLTSLPQEMVSYMPDLDSLYLHGNPWTCDCHLKWLSDWIQEKPGIYIVLPDVIKCKKDRSPSSAQQCPLCMNPRTSKGKPLAMVSAAAFQCAKPTIDSSLKSKSLTILEDSSSAFISPQGFMAPFGSLTLNMTDQSGNEANMVCSIQKPSRTSPIAFTEENDYIVLNTSFSTFLVCNIDYGHIQPVWQILALYSDSPLILERSHLLSETPQLYYKYKQVAPKPEDIFTNIEADLRADPSWLMQDQISLQLNRTATTFSTLQIQYSSDAQITLPRAEMRPVKHKWTMISRDNNTKLEHTVLVGGTVGLNCPGQGDPTPHVDWLLADGSKVRAPYVSEDGRILIDKSGKLELQMADSFDTGVYHCISSNYDDADILTYRITVVEPLVEAYQENGIHHTVFIGETLDLPCHSTGIPDASISWVIPGNNVLYQSSRDKKVLNNGTLRILQVTPKDQGYYRCVAANPSGVDFLIFQVSVKMKGQRPLEHDGETEGSGLDESNPIAHLKEPPGAQLRTSALMEAEVGKHTSSTSKRHNYRELTLQRRGDSTHRRFRENRRHFPPSARRIDPQHWAALLEKAKKNAMPDKRENTTVSPPPVVTQLPNIPGEEDDSSGMLALHEEFMVPATKALNLPARTVTADSRTISDSPMTNINYGTEFSPVVNSQILPPEEPTDFKLSTAIKTTAMSKNINPTMSSQIQGTTNQHSSTVFPLLLGATEFQDSDQMGRGREHFQSRPPITVRTMIKDVNVKMLSSTTNKLLLESVNTTNSHQTSVREVSEPRHNHFYSHTTQILSTSTFPSDPHTAAHSQFPIPRNSTVNIPLFRRFGRQRKIGGRGRIISPYRTPVLRRHRYSIFRSTTRGSSEKSTTAFSATVLNVTCLSCLPRERLTTATAALSFPSAAPITFPKADIARVPSEESTTLVQNPLLLLENKPSVEKTTPTIKYFRTEISQVTPTGAVMTYAPTSIPMEKTHKVNASYPRVSSTNEAKRDSVITSSLSGAITKPPMTIIAITRFSRRKIPWQQNFVNNHNPKGRLRNQHKVSLQKSTAVMLPKTSPALPQRQSLPSHHTTTKTHNPGSLPTKKELPFPPLNPMLPSIISKDSSTKSIISTQTAIPATTPTFPASVITYETQTERSRAQTIQREQEPQKKNRTDPNISPDQSSGFTTPTAMTPPVLTTAETSVKPSVSAFTHSPPENTTGISSTISFHSRTLNLTDVIEELAQASTQTLKSTIASETTLSSKSHQSTTTRKAIIRHSTIPPFLSSSATLMPVPISPPFTQRAVTDNVATPISGLMTNTVVKLHESSRHNAKPQQLVAEVATSPKVHPNAKFTIGTTHFIYSNLLHSTPMPALTTVKSQNSKLTPSPWAENQFWHKPYSEIAEKGKKPEVSMLATTGLSEATTLVSDWDGQKNTKKSDFDKKPVQEATTSKLLPFDSLSRYIFEKPRIVGGKAASFTIPANSDAFLPCEAVGNPLPTIHWTRVPSGMSGLDLSKRKQNSRVQVLPNGTLSIQRVEIQDRGQYLCSASNLFGTDHLHVTLSVVSYPPRILERRTKEITVHSGSTVELKCRAEGRPSPTVTWILANQTVVSESSQGSRQAVVTVDGTLVLHNLSIYDRGFYKCVASNPGGQDSLLVKIQVIAAPPVILEQRRQVIVGTWGESLKLPCTAKGTPQPSVYWVLSDGTEVKPLQFTNSKLFLFSNGTLYIRNLASSDRGTYECIATSSTGSERRVVMLTMEERVTSPRIEAASQKRTEVNFGDKLLLNCSATGEPKPQIMWRLPSKAVVDQQHRVGSWIHVYPNGSLFIGSVTEKDSGVYLCVARNKMGDDLILMHVSLRLKPAKIDHKQYFRKQVLHGKDFQVDCKASGSPVPEISWSLPDGTMINNAMQADDSGHRTRRYTLFNNGTLYFNKVGVAEEGDYTCYAQNTLGKDEMKVHLTVITAAPRIRQSNKTNKRIKAGDTAVLDCEVTGDPKPKIFWLLPSNDMISFSIDRYTFHANGSLTINKVKLLDSGEYVCVARNPSGDDTKMYKLDVVSKPPLINGLYTNRTVIKATAVRHSKKHFDCRAEGTPSPEVMWIMPDNIFLTAPYYGSRITVHKNGTLEIRNVRLSDSADFICVARNEGGESVLVVQLEVLEMLRRPTFRNPFNEKIVAQLGKSTALNCSVDGNPPPEIIWILPNGTRFSNGPQSYQYLIASNGSFIISKTTREDAGKYRCAARNKVGYIEKLVILEIGQKPVILTYAPGTVKGISGESLSLHCVSDGIPKPNIKWTMPSGYVVDRPQINGKYILHDNGTLVIKEATAYDRGNYICKAQNSVGHTLITVPVMIVAYPPRITNRPPRSIVTRTGAAFQLHCVALGVPKPEITWEMPDHSLLSTASKERTHGSEQLHLQGTLVIQNPQTSDSGIYKCTAKNPLGSDYAATYIQVI

SEQ ID NO: 745 - DNA, 7876 bp, Homo sapiens
  CDS (6)..(7856)
  misc_feature (746)..(746): Wherein n may be a, c, g or t
tcaggatgaaggtaaaaggcagaggaatcacctgcttgctggtctcctttgctgtgatctgcctggtcgccacccctgggggcaaggcctgtcctcgccgctgtgcctgttatatgcctacggaggtacactgcacatttcggtacctgacttccatcccagacagcatcccgcccaatgtggaacgcatcaatttagggtacaacagcttggttagattgatggaaacagatttttctggcctgaccaaactggagttactcatgcttcacagcaatggcattcacacaatccctgacaagaccttctcagatttgcaggccttgcaggtgagactgatggtcttaaaaatgagctataataaagtccgaaaacttcagaaagatactttttatggcctcaggagcttgacacgattgcacatggaccacaacaatattgagtttataaacccagaggttttttatgggctcaactttctccgcctggtgcacttggaaggaaatcagctcactaagctccacccagatacatttgtctctttgagctacctccagatatttaaaatctctttcattaagttcctatacttgtctgataacttcctgacctccctccctcaagagatggtctcctatatgcctgacctagacagcctttacctgcatggaaacccatggacctgtgattgccatttaaagtggttgtctgactggatacaggagaagccaggtatctatattgtnttaccagatgtaataaaatgcaaaaaagatagaagtccctctagtgctcagcagtgtccactttgcatgaaccctaggacttctaaaggcaagccgttagctatggtctcagctgcagctttccagtgtgccaagccaaccattgactcatccctgaaatcaaagagcctgactattctggaagacagtagttctgctttcatctctccccaaggtttcatggcaccctttggctccctcactttgaatatgacagatcagtctggaaatgaagctaacatggtctgcagtattcaaaagccctcaaggacatcacccattgcattcactgaagaaaatgactacatcgtgctaaatacttcattttcaacatttttggtgtgcaacatagattacggtcacattcagccagtgtggcaaattttggctttgtacagtgattctcctctgatactagaaaggagccacttgcttagtgaaacaccgcagctctattacaaatataaacaggtggctcctaagcctgaagacatttttaccaacatagaggcagatctcagagcagatccctcttggttaatgcaagaccaaatttccttgcagctgaacagaactgccaccacattcagtacattacagatccagtactccagtgatgctcaaatcactttaccaagagcagagatgaggccagtgaaacacaaatggactatgatttcaagggataacaatactaagctggaacatactgtcttggtaggtggaaccgttggcctgaactgcccaggccaaggagaccccaccccacacgtggattggcttctagctgatggaagtaaagtgagagccccttatgtcagtgaggatggacggatcctaatagacaaaagtggaaaattggaactccagatggctgatagttttgacacaggcgtatatcactgtataagcagcaattatgatgatgcagatattctcacctataggataactgtggtagaacctttggtcgaagcctatcaggaaaatgggattcatcacacagttttcattggtgaaacacttgatcttccatgccattctactggtatcccagatgcctctattagctgggttattccaggaaacaatgtgctctatcagtcatcaagagacaagaaagttctaaacaatggcacattaagaatattacaggtcaccccgaaagaccaaggttattatcgctgtgtggcagccaacccatcaggggttgattttttgattttccaagtttcagtcaagatgaaaggacaaaggcccttggagcatgatggagaaacagagggatctggacttgatgagtccaatcctattgctcatcttaaggagccaccaggtgcacaactccgtacatctgctctgatggaggctgaggttggaaaacacacctcaagcacaagtaagaggcacaactatcgggaattaacactccagcgacgtggagattcaacacatcgacgttttagggagaataggaggcatttccctccctctgctaggagaattgacccacaacattgggcggcactgttggagaaagctaaaaagaatgctatgccagacaagcgagaaaataccacagtgagcccacccccagtggtcacccaactcccaaacatacctggtgaagaagacgattcctcaggcatgctcgctctacatgaggaatttatggtcccggccactaaagctttgaaccttccagcaaggacagtgactgctgactccagaacaatatctgatagtcctatgacaaacataaattatggcacagaattctctcctgttgtgaattcacaaatactaccacctgaagaacccacagatttcaaactgtctactgctattaaaactacagccatgtcaaagaatataaacccaaccatgtcaagccaaatacaaggcacaaccaatcaacattcatccactgtctttccactgctacttggagcaactgaatttcaggactctgaccagatgggaagaggaagagagcatttccaaagtagacccccaataacagtaaggactatgatcaaagatgtcaatgtcaaaatgcttagtagcaccaccaacaaactattattagagtcagtaaataccacaaatagtcatcagacatctgtaagagaagtgagtgaacccaggcacaatcacttctattctcacactactcaaatacttagcacctccacgttcccttcagatccacacacagctgctcattctcagtttccgatccctagaaatagtacagttaacatcccgctgttcagacgctttgggaggcagaggaaaattggcggaagggggcggattatcagcccatatagaactccagttctgcgacggcatagatacagcattttcaggtcaacaaccagaggttcttctgaaaaaagcactactgcattctcagccacagtgctcaatgtgacatgtctgtcctgtcttcccagggagaggctcaccactgccacagcagcattgtcttttccaagtgctgctcccatcaccttccccaaagctgacattgctagagtcccatcagaagagtctacaactctagtccagaatccactattactacttgagaacaaacccagtgtagagaaaacaacacccacaataaaatatttcaggactgaaatttcccaagtgactccaactggtgcagtcatgacatatgctccaacatccatacccatggaaaaaactcacaaagtaaacgccagttacccacgtgtgtctagcaccaatgaagctaaaagagattcagtgattacatcgtcactttcaggtgctatcaccaagccaccaatgactattatagccattacaaggttttcaagaaggaaaattccctggcaacagaactttgtaaataaccataacccaaaaggcagattaaggaatcaacataaagttagtttacaaaaaagcacagctgtgatgcttcctaaaacatctcctgctttaccacagagacaaagtctcccctcgcaccacactacgaccaaaacacacaatcctggaagtcttccaacaaagaaggagcttcccttcccaccccttaaccctatgcttcctagtattataagcaaagactcaagtacaaaaagcatcatatcaacgcaaacagcaataccagcaacaactcctaccttccctgcatctgtcatcacttatgaaacccaaacagagagatctagagcacaaacaatacaaagagaacaggagcctcaaaagaagaacaggactgacccaaacatctctccagaccagagttctggcttcactacacccactgctatgacacctcctgttctaaccacagccgaaacttcagtcaagcccagtgtctctgcattcactcattccccaccagaaaacacaactgggatttcaagcacaatcagttttcattcaagaactcttaatctgacagatgtgattgaagaactagcccaagcaagtactcagactttgaagagcacaattgcttctgaaacaactttgtccagcaaatcacaccagagtaccacaactaggaaagcaatcattagacactcaaccataccaccattcttgagcagcagtgctactctaatgccagttctcatctcccctccctttactcagagagcagttactgacaacgtggcgactcccatttccgggcttatgacaaatacagtggtcaagctgcacgaatcctcaaggcacaatgctaaaccacagcaattagtagcagaggttgcaacatcccccaaggttcacccaaatgccaagttcacaattggaaccactcacttcatctactctaatctgttacattctactcccatgccagcactaacaacagttaaatcacagaattctaaattaactccatctccctgggcagaaaaccaattttggcacaaaccatactcagaaattgctgaaaaaggcaaaaagccagaagtaagcatgttggctactacaggcctgtccgaggccaccactcttgtttcagattgggatggacagaagaacacaaagaagagtgactttgataagaaaccagttcaagaagcaacaacttccaaactccttccctttgactctttgtctaggtatatatttgaaaagcccaggatagttggaggaaaagctgcaagttttactattccagctaactcagatgcctttcttccctgtgaagctgttggaaatcccctgcccaccattcattggaccagagtcccatcaggtatgtcaggacttgatttatctaagaggaaacagaatagcagggtccaggttctccccaatggtaccctgtccatccagagggtggaaattcaggaccgcggacagtacttgtgttccgcatccaatctgtttggcacagaccaccttcatgtcaccttgtctgtggtttcctatcctcccaggatcctggagagacgtaccaaagagatcacagttcattccggaagcactgtggaactgaagtgcagagcagaaggtaggccaagccctacagttacctggattcttgcaaaccaaacagttgtctcagaatcatcccagggaagtaggcaggctgtggtgacggttgacggaacattggtcctccacaatctcagtatttatgaccgtggcttttacaaatgtgtggccagcaacccaggtggccaggattcactgctggttaaaatacaagtcattgcagcaccacctgttattctagagcaaaggaggcaagtcattgtaggcacttggggtgaaagtttaaaactgccctgtactgcaaaaggaactcctcagcccagcgtttactgggtcctctctgatggcactgaagtgaaaccattacagtttaccaattccaagttgttcttattttcaaatgggactttgtatataagaaacctagcctcttcagacaggggcacttatgaatgcattgctaccagttccactggttcggagcgaagagtagtaatgcttacaatggaagagcgagtgaccagccccaggatagaagctgcatcccagaaaaggactgaagtgaattttggggacaaattactactgaactgctcagccactggggagcccaaaccccaaataatgtggaggttaccatccaaggctgtggtcgaccagcagcatagggtgggcagctggatccacgtctaccctaatggatccctgtttattggatcagtaacagaaaaagacagtggtgtctacttgtgtgtggcaagaaacaaaatgggggatgatctgatactgatgcatgttagcctaagactgaaacctgccaaaattgaccacaagcagtattttagaaagcaagtgctccatgggaaagatttccaagtagattgcaaagcttccggctccccagtgccagagatatcttggagtttgcctgatggaaccatgatcaacaatgcaatgcaagccgatgacagtggccacaggactaggagatatacccttttcaacaatggaactttatacttcaacaaagttggggtagcggaggaaggagattatacttgctatgcccagaacaccctagggaaagatgaaatgaaggtccacttaacagttataacagctgctccccggataaggcagagtaacaaaaccaacaagagaatcaaagctggagacacagctgtccttgactgtgaggtcactggggatcccaaaccaaaaatattttggttgctgccttccaatgacatgatttccttctccattgataggtacacatttcatgccaatgggtctttgaccatcaacaaagtgaaactgctcgattctggagagtacgtatgtgtagcccgaaatcccagtggggatgacaccaaaatgtacaaactggatgtggtctctaaacctccattaatcaatggtctgtatacaaacagaactgttattaaagccacagctgtgagacattccaaaaaacactttgactgcagagctgaagggacaccatctcctgaagtcatgtggatcatgccagacaatattttcctcacagccccatactatggaagcagaatcacagtccataaaaatggaaccttggaaattaggaatgtgaggctttcagattcagccgactttatctgtgtggcccgaaatgaaggtggagagagcgtgttggtagtacagttagaagtactggaaatgctgagaagaccgacatttagaaatccatttaatgaaaaaatagttgcccagctgggaaagtccacagcattgaattgctctgttgatggtaacccaccacctgaaataatctggattttaccaaatggcacacgattttccaatggaccacaaagttatcagtatctgatagcaagcaatggttcttttatcatttctaaaacaactcgggaggatgcaggaaaatatcgctgtgcagctaggaataaagttggctatattgagaaattagtcatattagaaattggccagaagccagttattcttacctatgcaccagggacagtaaaaggcatcagtggagaatctctatcactgcattgtgtgtctgatggaatccctaagccaaatatcaaatggactatgccaagtggttatgtagtagacaggcctcaaattaatgggaaatacatattgcatgacaatggcaccttagtcattaaagaagcaacagcttatgacagaggaaactatatctgtaaggctcaaaatagtgttggtcatacactgattactgttccagtaatgattgtagcctaccctccccgaattacaaatcgtccacccaggagtattgtcaccaggacaggggcagcctttcagctccactgtgtggccttgggagttcccaagccagaaatcacatgggagatgcctgaccactcccttctctcaacggcaagtaaagagaggacacatggaagtgagcagcttcacttacaaggtaccctagtcattcagaatccccaaacctccgattctgggatatacaaatgcacagcaaagaacccacttggtagtgattatgcagcaacgtatattcaagtaatctgacatgaaataataaagtc

SEQ ID NO: 746 - protein, 2617 aa, Homo sapiens
MKVKGRGITCLLVSFAVICLVATPGGKACPRRCACYMPTEVHCTFRYLTSIPDSIPPNVERINLGYNSLVRLMETDFSGLTKLELLMLHSNGIHTIPDKTFSDLQALQVRLMVLKMSYNKVRKLQKDTFYGLRSLTRLHMDHNNIEFINPEVFYGLNFLRLVHLEGNQLTKLHPDTFVSLSYLQIFKISFIKFLYLSDNFLTSLPQEMVSYMPDLDSLYLHGNPWTCDCHLKWLSDWIQEKPGIYIVLPDVIKCKKDRSPSSAQQCPLCMNPRTSKGKPLAMVSAAAFQCAKPTIDSSLKSKSLTILEDSSSAFISPQGFMAPFGSLTLNMTDQSGNEANMVCSIQKPSRTSPIAFTEENDYIVLNTSFSTFLVCNIDYGHIQPVWQILALYSDSPLILERSHLLSETPQLYYKYKQVAPKPEDIFTNIEADLRADPSWLMQDQISLQLNRTATTFSTLQIQYSSDAQITLPRAEMRPVKHKWTMISRDNNTKLEHTVLVGGTVGLNCPGQGDPTPHVDWLLADGSKVRAPYVSEDGRILIDKSGKLELQMADSFDTGVYHCISSNYDDADILTYRITVVEPLVEAYQENGIHHTVFIGETLDLPCHSTGIPDASISWVIPGNNVLYQSSRDKKVLNNGTLRILQVTPKDQGYYRCVAANPSGVDFLIFQVSVKMKGQRPLEHDGETEGSGLDESNPIAHLKEPPGAQLRTSALMEAEVGKHTSSTSKRHNYRELTLQRRGDSTHRRFRENRRHFPPSARRIDPQHWAALLEKAKKNAMPDKRENTTVSPPPVVTQLPNIPGEEDDSSGMLALHEEFMVPATKALNLPARTVTADSRTISDSPMTNINYGTEFSPVVNSQILPPEEPTDFKLSTAIKTTAMSKNINPTMSSQIQGTTNQHSSTVFPLLLGATEFQDSDQMGRGREHFQSRPPITVRTMIKDVNVKMLSSTTNKLLLESVNTTNSHQTSVREVSEPRHNHFYSHTTQILSTSTFPSDPHTAAHSQFPIPRNSTVNIPLFRRFGRQRKIGGRGRIISPYRTPVLRRHRYSIFRSTTRGSSEKSTTAFSATVLNVTCLSCLPRERLTTATAALSFPSAAPITFPKADIARVPSEESTTLVQNPLLLLENKPSVEKTTPTIKYFRTEISQVTPTGAVMTYAPTSIPMEKTHKVNASYPRVSSTNEAKRDSVITSSLSGAITKPPMTIIAITRFSRRKIPWQQNFVNNHNPKGRLRNQHKVSLQKSTAVMLPKTSPALPQRQSLPSHHTTTKTHNPGSLPTKKELPFPPLNPMLPSIISKDSSTKSIISTQTAIPATTPTFPASVITYETQTERSRAQTIQREQEPQKKNRTDPNISPDQSSGFTTPTAMTPPVLTTAETSVKPSVSAFTHSPPENTTGISSTISFHSRTLNLTDVIEELAQASTQTLKSTIASETTLSSKSHQSTTTRKAIIRHSTIPPFLSSSATLMPVLISPPFTQRAVTDNVATPISGLMTNTVVKLHESSRHNAKPQQLVAEVATSPKVHPNAKFTIGTTHFIYSNLLHSTPMPALTTVKSQNSKLTPSPWAENQFWHKPYSEIAEKGKKPEVSMLATTGLSEATTLVSDWDGQKNTKKSDFDKKPVQEATTSKLLPFDSLSRYIFEKPRIVGGKAASFTIPANSDAFLPCEAVGNPLPTIHWTRVPSGMSGLDLSKRKQNSRVQVLPNGTLSIQRVEIQDRGQYLCSASNLFGTDHLHVTLSVVSYPPRILERRTKEITVHSGSTVELKCRAEGRPSPTVTWILANQTVVSESSQGSRQAVVTVDGTLVLHNLSIYDRGFYKCVASNPGGQDSLLVKIQVIAAPPVILEQRRQVIVGTWGESLKLPCTAKGTPQPSVYWVLSDGTEVKPLQFTNSKLFLFSNGTLYIRNLASSDRGTYECIATSSTGSERRVVMLTMEERVTSPRIEAASQKRTEVNFGDKLLLNCSATGEPKPQIMWRLPSKAVVDQQHRVGSWIHVYPNGSLFIGSVTEKDSGVYLCVARNKMGDDLILMHVSLRLKPAKIDHKQYFRKQVLHGKDFQVDCKASGSPVPEISWSLPDGTMINNAMQADDSGHRTRRYTLFNNGTLYFNKVGVAEEGDYTCYAQNTLGKDEMKVHLTVITAAPRIRQSNKTNKRIKAGDTAVLDCEVTGDPKPKIFWLLPSNDMISFSIDRYTFHANGSLTINKVKLLDSGEYVCVARNPSGDDTKMYKLDVVSKPPLINGLYTNRTVIKATAVRHSKKHFDCRAEGTPSPEVMWIMPDNIFLTAPYYGSRITVHKNGTLEIRNVRLSDSADFICVARNEGGESVLVVQLEVLEMLRRPTFRNPFNEKIVAQLGKSTALNCSVDGNPPPEIIWILPNGTRFSNGPQSYQYLIASNGSFIISKTTREDAGKYRCAARNKVGYIEKLVILEIGQKPVILTYAPGTVKGISGESLSLHCVSDGIPKPNIKWTMPSGYVVDRPQINGKYILHDNGTLVIKEATAYDRGNYICKAQNSVGHTLITVPVMIVAYPPRITNRPPRSIVTRTGAAFQLHCVALGVPKPEITWEMPDHSLLSTASKERTHGSEQLHLQGTLVIQNPQTSDSGIYKCTAKNPLGSDYAATYIQVI

SEQ ID NO: 747 - DNA, 7876 bp, Homo sapiens
  CDS (6)..(7856)
  misc_feature (746)..(746): Wherein n may be a, c, g or t
tcaggatgaaggtaaaaggcagaggaatcacctgcttgctggtctcctttgctgtgatctgcctggtcgccacccctgggggcaaggcctgtcctcgccgctgtgcctgttatatgcctacggaggtacactgcacatttcggtacctgacttccatcccagacagcatcccgcccaatgtggaacgcatcaatttagggtacaacagcttggttagattgatggaaacagatttttctggcctgaccaaactggagttactcatgcttcacagcaatggcattcacacaatccctgacaagaccttctcagatttgcaggccttgcaggtgagactgatggtcttaaaaatgagctataataaagtccgaaaacttcagaaagatactttttatggcctcaggagcttgacacgattgcacatggaccacaacaatattgagtttataaacccagaggttttttatgggctcaactttctccgcctggtgcacttggaaggaaatcagctcactaagctccacccagatacatttgtctctttgagctacctccagatatttaaaatctctttcattaagttcctatacttgtctgataacttcctgacctccctccctcaagagatggtctcctatatgcctgacctagacagcctttacctgcatggaaacccatggacctgtgattgccatttaaagtggttgtctgactggatacaggagaagccaggtatctatattgtnttaccagatgtaataaaatgcaaaaaagatagaagtccctctagtgctcagcagtgtccactttgcatgaaccctaggacttctaaaggcaagccgttagctatggtctcagctgcagctttccagtgtgccaagccaaccattgactcatccctgaaatcaaagagcctgactattctggaagacagtagttctgctttcatctctccccaaggtttcatggcaccctttggctccctcactttgaatatgacagatcagtctggaaatgaagctaacatggtctgcagtattcaaaagccctcaaggacatcacccattgcattcactgaagaaaatgactacatcgtgctaaatacttcattttcaacatttttggtgtgcaacatagattacggtcacattcagccagtgtggcaaattttggctttgtacagtgattctcctctgatactagaaaggagccacttgcttagtgaaacaccgcagctctattacaaatataaacaggtggctcctaagcctgaagacatttttaccaacatagaggcagatctcagagcagatccctcttggttaatgcaagaccaaatttccttgcagctgaacagaactgccaccacattcagtacattacagatccagtactccagtgatgctcaaatcactttaccaagagcagagatgaggccagtgaaacacaaatggactatgatttcaagggataacaatactaagctggaacatactgtcttggtaggtggaaccgttggcctgaactgcccaggccaaggagaccccaccccacacgtggattggcttctagctgatggaagtaaagtgagagccccttatgtcagtgaggatggacggatcctaatagacaaaagtggaaaattggaactccagatggctgatagttttgacacaggcgtatatcactgtataagcagcaattatgatgatgcagatattctcacctataggataactgtggtagaacctttggtcgaagcctatcaggaaaatgggattcatcacacagttttcattggtgaaacacttgatcttccatgccattctactggtatcccagatgcctctattagctgggttattccaggaaacaatgtgctctatcagtcatcaagagacaagaaagttctaaacaatggcacattaagaatattacaggtcaccccgaaagaccaaggttattatcgctgtgtggcagccaacccatcaggggttgattttttgattttccaagtttcagtcaagatgaaaggacaaaggcccttggagcatgatggagaaacagagggatctggacttgatgagtccaatcctattgctcatcttaaggagccaccaggtgcacaactccgtacatctgctctgatggaggctgaggttggaaaacacacctcaagcacaagtaagaggcacaactatcgggaattaacactccagcgacgtggagattcaacacatcgacgttttagggagaataggaggcatttccctccctctgctaggagaattgacccacaacattgggcggcactgttggagaaagctaaaaagaatgctatgccagacaagcgagaaaataccacagtgagcccacccccagtggtcacccaactcccaaacatacctggtgaagaagacgattcctcaggcatgctcgctctacatgaggaatttatggtcccggccactaaagctttgaaccttccagcaaggacagtgactgctgactccagaacaatatctgatagtcctatgacaaacataaattatggcacagaattctctcctgttgtgaattcacaaatactaccacctgaagaacccacagatttcaaactgtctactgctattaaaactacagccatgtcaaagaatataaacccaaccatgtcaagccaaatacaaggcacaaccaatcaacattcatccactgtctttccactgctacttggagcaactgaatttcaggactctgaccagatgggaagaggaagagagcatttccaaagtagacccccaataacagtaaggactatgatcaaagatgtcaatgtcaaaatgcttagtagcaccaccaacaaactattattagagtcagtaaataccacaaatagtcatcagacatctgtaagagaagtgagtgaacccaggcacaatcacttctattctcacactactcaaatacttagcacctccacgttcccttcagatccacacacagctgctcattctcagtttccgatccctagaaatagtacagttaacatcccgctgttcagacgctttgggaggcagaggaaaattggcggaagggggcggattatcagcccatatagaactccagttctgcgacggcatagatacagcattttcaggtcaacaaccagaggttcttctgaaaaaagcactactgcattctcagccacagtgctcaatgtgacatgtctgtcctgtcttcccagggagaggctcaccactgccacagcagcattgtcttttccaagtgctgctcccatcaccttccccaaagctgacattgctagagtcccatcagaagagtctacaactctagtccagaatccactattactacttgagaacaaacccagtgtagagaaaacaacacccacaataaaatatttcaggactgaaatttcccaagtgactccaactggtgcagtcatgacatatgctccaacatccatacccatggaaaaaactcacaaagtaaacgccagttacccacgtgtgtctagcaccaatgaagctaaaagagattcagtgattacatcgtcactttcaggtgctatcaccaagccaccaatgactattatagccattacaaggttttcaagaaggaaaattccctggcaacagaactttgtaaataaccataacccaaaaggcagattaaggaatcaacataaagttagtttacaaaaaagcacagctgtgatgcttcctaaaacatctcctgctttaccacagagacaaagtctcccctcgcaccacactacgaccaaaacacacaatcctggaagtcttccaacaaagaaggagcttcccttcccaccccttaaccctatgcttcctagtattataagcaaagactcaagtacaaaaagcatcatatcaacgcaaacagcaataccagcaacaactcctaccttccctgcatctgtcatcacttatgaaacccaaacagagagatctagagcacaaacaatacaaagagaacaggagcctcaaaagaagaacaggactgacccaaacatctctccagaccagagttctggcttcactacacccactgctatgacacctcctgttctaaccacagccgaaacttcagtcaagcccagtgtctctgcattcactcattccccaccagaaaacacaactgggatttcaagcacaatcagttttcattcaagaactcttaatctgacagatgtgattgaagaactagcccaagcaagtactcagactttgaagagcacaattgcttctgaaacaactttgtccagcaaatcacaccagagtaccacaactaggaaagcaatcattagacactcaaccataccaccattcttgagcagcagtgctactctaatgccagttcccatctcccctccctttactcagagagcagttactgacaacgtggcgactcccatttccgggcttatgacaaatacagtggtcaagctgcacgaatcctcaaggcacaatgctaaaccacagcaattagtagcagaggttgcaacatcccccaaggttcacccaaatgccaagttcacaattggaaccactcacttcatctactctaatctgttacattctactcccatgccagcactaacaacagttaaatcacagaattctaaattaactccatctccctgggcagaaaaccaattttggcacaaaccatactcagaaattgctgaaaaaggcaaaaagccagaagtaagcatgttggctactacaggcctgtccgaggccaccactcttgtttcagattgggatggacagaagaacacaaagaagagtgactttgataagaaaccagttcaagaagcaacaacttccaaactccttccctttgactctttgtctaggtatatatttgaaaagcccaggatagttggaggaaaagctgcaagttttactattccagctaactcagatgcctttcttccctgtgaagctgttggaaatcccctgcccaccattcattggaccagagtcccatcaggtatgtcaggacttgatttatctaagaggaaacagaatagcagggtccaggttctccccaatggtaccctgtccatccagagggtggaaattcaggaccgcggacagtacttgtgttccgcatccaatctgtttggcacagaccaccttcatgtcaccttgtctgtggtttcctatcctcccaggatcctggagagacgtaccaaagagatcacagttcattccggaagcactgtggaactgaagtgcagagcagaaggtaggccaagccctacagttacctggattcttgcaaaccaaacagttgtctcagaatcatcccagggaagtaggcaggctgtggtgacggttgacggaacattggtcctccacaatctcagtatttatgaccgtggcttttacaaatgtgtggccagcaacccaggtggccaggattcactgctggttaaaatacaagtcattgcagcaccacctgttattctagagcaaaggaggcaagtcattgtaggcacttggggtgaaagtttaaaactgccctgtactgcaaaaggaactcctcagcccagcgtttactgggtcctctctgatggcactgaagtgaaaccattacagtttaccaattccaagttgttcttattttcaaatgggactttgtatataagaaacctagcctcttcagacaggggcacttatgaatgcattgctaccagttccactggttcggagcgaagagtagtaatgcttacaatggaagagcgagtgaccagccccaggatagaagctgcatcccagaaaaggactgaagtgaattttggggacaaattactactgaactgctcagccactggggagcccaaaccccaaataatgtggaggttaccatccaaggctgtggtcgaccagcagcatagggtgggcagctggatccacgtctaccctaatggatccctgtttattggatcagtaacagaaaaagacagtggtgtctacttgtgtgtggcaagaaacaaaatgggggatgatctgatactgatgcatgttagcctaagactgaaacctgccaaaattgaccacaagcagtattttagaaagcaagtgctccatgggaaagatttccaagtagattgcaaagcttccggctccccagtgccagagatatcttggagtttgcctgatggaaccatgatcaacaatgcaatgcaagccgatgacagtggccacaggactaggagatatacccttttcaacaatggaactttatacttcaacaaagttggggtagcggaggaaggagattatacttgctatgcccagaacaccctagggaaagatgaaatgaaggtccacttaacagttataacagctgctccccggataaggcagagtaacaaaaccaacaagagaatcaaagctggagacacagctgtccttgactgtgaggtcactggggatcccaaaccaaaaatattttggttgctgccttccaatgacatgatttccttctccattgataggtacacatttcatgccaatgggtctttgaccatcaacaaagtgaaactgctcgattctggagagtacgtatgtgtagcccgaaatcccagtggggatgacaccaaaatgtacaaactggatgtggtctctaaacctccattaatcaatggtctgtatacaaatagaactgttattaaagccacagctgtgagacattccaaaaaacactttgactgcagagctgaagggacaccatctcctgaagtcatgtggatcatgccagacaatattttcctcacagccccatactatggaagcagaatcacagtccataaaaatggaaccttggaaattaggaatgtgaggctttcagattcagccgactttatctgtgtggcccgaaatgaaggtggagagagcgtgttggtagtacagttagaagtactggaaatgctgagaagaccgacatttagaaatccatttaatgaaaaaatagttgcccagctgggaaagtccacagcattgaattgctctgttgatggtaacccaccacctgaaataatctggattttaccaaatggcacacgattttccaatggaccacaaagttatcagtatctgatagcaagcaatggttcttttatcatttctaaaacaactcgggaggatgcaggaaaatatcgctgtgcagctaggaataaagttggctatattgagaaattagtcatattagaaattggccagaagccagttattcttacctatgcaccagggacagtaaaaggcatcagtggagaatctctatcactgcattgtgtgtctgatggaatccctaagccaaatatcaaatggactatgccaagtggttatgtagtagacaggcctcaaattaatgggaaatacatattgcatgacaatggcaccttagtcattaaagaagcaacagcttatgacagaggaaactatatctgtaaggctcaaaatagtgttggtcatacactgattactgttccagtaatgattgtagcctaccctccccgaattacaaatcgtccacccaggagtattgtcaccaggacaggggcagcctttcagctccactgtgtggccttgggagttcccaagccagaaatcacatgggagatgcctgaccactcccttctctcaacggcaagtaaagagaggacacatggaagtgagcagcttcacttacaaggtaccctagtcattcagaatccccaaacctccgattctgggatatacaaatgcacagcaaagaacccacttggtagtgattatgcagcaacgtatattcaagtaatctgacatgaaataataaagtc

SEQ ID NO: 748 - protein, 2617 aa, Homo sapiens; identical to SEQ ID NO: 666

SEQ ID NO: 749 - DNA, 7876 bp, Homo sapiens
  CDS (6)..(7856)
  misc_feature (746)..(746): Wherein n may be a, c, g or t
tcaggatgaaggtaaaaggcagaggaatcacctgcttgctggtctcctttgctgtgatctgcctggtcgccacccctgggggcaaggcctgtcctcgccgctgtgcctgttatatgcctacggaggtacactgcacatttcggtacctgacttccatcccagacagcatcccgcccaatgtggaacgcatcaatttagggtacaacagcttggttagattgatggaaacagatttttctggcctgaccaaactggagttactcatgcttcacagcaatggcattcacacaatccctgacaagaccttctcagatttgcaggccttgcaggtgagactgatggtcttaaaaatgagctataataaagtccgaaaacttcagaaagatactttttatggcctcaggagcttgacacgattgcacatggaccacaacaatattgagtttataaacccagaggttttttatgggctcaactttctccgcctggtgcacttggaaggaaatcagctcactaagctccacccagatacatttgtctctttgagctacctccagatatttaaaatctctttcattaagttcctatacttgtctgataacttcctgacctccctccctcaagagatggtctcctatatgcctgacctagacagcctttacctgcatggaaacccatggacctgtgattgccatttaaagtggttgtctgactggatacaggagaagccaggtatctatattgtnttaccagatgtaataaaatgcaaaaaagatagaagtccctctagtgctcagcagtgtccactttgcatgaaccctaggacttctaaaggcaagccgttagctatggtctcagctgcagctttccagtgtgccaagccaaccattgactcatccctgaaatcaaagagcctgactattctggaagacagtagttctgctttcatctctccccaaggtttcatggcaccctttggctccctcactttgaatatgacagatcagtctggaaatgaagctaacatggtctgcagtattcaaaagccctcaaggacatcacccattgcattcactgaagaaaatgactacatcgtgctaaatacttcattttcaacatttttggtgtgcaacatagattacggtcacattcagccagtgtggcaaattttggctttgtacagtgattctcctctgatactagaaaggagccacttgcttagtgaaacaccgcagctctattacaaatataaacaggtggctcctaagcctgaagacatttttaccaacatagaggcagatctcagagcagatccctcttggttaatgcaagaccaaatttccttgcagctgaacagaactgccaccacattcagtacattacagatccagtactccagtgatgctcaaatcactttaccaagagcagagatgaggccagtgaaacacaaatggactatgatttcaagggataacaatactaagctggaacatactgtcttggtaggtggaaccgttggcctgaactgcccaggccaaggagaccccaccccacacgtggattggcttctagctgatggaagtaaagtgagagccccttatgtcagtgaggatggacggatcctaatagacaaaagtggaaaattggaactccagatggctgatagttttgacacaggcgtatatcactgtataagcagcaattatgatgatgcagatattctcacctataggataactgtggtagaacctttggtcgaagcctatcaggaaaatgggattcatcacacagttttcattggtgaaacacttgatcttccatgccattctactggtatcccagatgcctctattagctgggttattccaggaaacaatgtgctctatcagtcatcaagagacaagaaagttctaaacaatggcacattaagaatattacaggtcaccccgaaagaccaaggttattatcgctgtgtggcagccaacccatcaggggttgattttttgattttccaagtttcagtcaagatgaaaggacaaaggcccttggagcatgatggagaaacagagggatctggacttgatgagtccaatcctattgctcatcttaaggagccaccaggtgcacaactccgtacatctgctctgatggaggctgaggttggaaaacacacctcaagcacaagtaagaggcacaactatcgggaattaacactccagcgacgtggagattcaacacatcgacgttttagggagaataggaggcatttccctccctctgctaggagaattgacccacaacattgggcggcactgttggagaaagctaaaaagaatgctatgccagacaagcgagaaaataccacagtgagcccacccccagtggtcacccaactcccaaacatacctggtgaagaagacgattcctcaggcatgctcgctctacatgaggaatttatggtcccggccactaaagctttgaaccttccagcaaggacagtgactgctgactccagaacaatatctgatagtcctatgacaaacataaattatggcacagaattctctcctgttgtgaattcacaaatactaccacctgaagaacccacagatttcaaactgtctactgctattaaaactacagccatgtcaaagaatataaacccaaccatgtcaagccaaatacaaggcacaaccaatcaacattcatccactgtctttccactgctacttggagcaactgaatttcaggactctgaccagatgggaagaggaagagagcatttccaaagtagacccccaataacagtaaggactatgatcaaagatgtcaatgtcaaaatgcttagtagcaccaccaacaaactattattagagtcagtaaataccacaaatagtcatcagacatctgtaagagaagtgagtgaacccaggcacaatcacttctattctcacactactcaaatacttagcacctccacgttcccttcagatccacacacagctgctcattctcagtttccgatccctagaaatagtacagttaacatcccgctgttcagacgctttgggaggcagaggaaaattggcggaagggggcggattatcagcccatatagaactccagttctgcgacggcatagatacagcattttcaggtcaacaaccagaggttcttctgaaaaaagcactactgcattctcagccacagtgctcaatgtgacatgtctgtcctgtcttcccagggagaggctcaccactgccacagcagcattgtcttttccaagtgctgctcccatcaccttccccaaagctgacattgctagagtcccatcagaagagtctacaactctagtccagaatccactattactacttgagaacaaacccagtgtagagaaaacaacacccacaataaaatatttcaggactgaaatttcccaagtgactccaactggtgcagtcatgacatatgctccaacatccatacccatggaaaaaactcacaaagtaaacgccagttacccacgtgtgtctagcaccaatgaagctaaaagagattcagtgattacatcgtcactttcaggtgctatcaccaagccaccaatgactattatagccattacaaggttttcaagaaggaaaattccctggcaacagaactttgtaaataaccataacccaaaaggcagattaaggaatcaacataaagttagtttacaaaaaagcacagctgtgatgcttcctaaaacatctcctgctttaccacagagacaaagtctcccctcgcaccacactacgaccaaaacacacaatcctggaagtcttccaacaaagaaggagcttcccttcccaccccttaaccctatgcttcctagtattataagcaaagactcaagtacaaaaagcatcatatcaacgcaaacagcaataccagcaacaactcctaccttccctgcatctgtcatcacttatgaaacccaaacagagagatctagagcacaaacaatacaaagagaacaggagcctcaaaagaagaacaggactgacccaaacatctctccagaccagagttctggcttcactacacccactgctatgacacctcctgttctaaccacagccgaaacttcagtcaagcccagtgtctctgcattcactcattccccaccagaaaacacaactgggatttcaagcacaatcagttttcattcaagaactcttaatctgacagatgtgattgaagaactagcccaagcaagtactcagactttgaagagcacaattgcttctgaaacaactttgtccagcaaatcacaccagagtaccacaactaggaaagcaatcattagacactcaaccataccaccattcttgagcagcagtgctactctaatgccagttcccatctcccctccctttactcagagagcagttactgacaacgtggcgactcccatttccgggcttatgacaaatacagtggtcaagctgcacgaatcctcaaggcacaatgctaaaccacagcaattagtagcagaggttgcaacatcccccaaggttcacccaaatgccaagttcacaattggaaccactcacttcatctactctaatctgttacattctactcccatgccagcactaacaacagttaaatcacagaattctaaattaactccatctccctgggcagaaaaccaattttggcacaaaccatactcagaaattgctgaaaaaggcaaaaagccagaagtaagcatgttggctactacaggcctgtccgaggccaccactcttgtttcagattgggatggacagaagaacacaaagaagagtgactttgataagaaaccagttcaagaagcaacaacttccaaactccttccctttgactctttgtctaggtatatatttgaaaagcccaggatagttggaggaaaagctgcaagttttactattccagctaactcagatgcctttcttccctgtgaagctgttggaaatcccctgcccaccattcattggaccagagtcccatcaggtatgtcaggacttgatttatctaagaggaaacagaatagcagggtccaggttctccccaatggtaccctgtccatccagagggtggaaattcaggaccgcggacagtacttgtgttccgcatccaatctgtttggcacagaccaccttcatgtcaccttgtctgtggtttcctatcctcccaggatcctggagagacgtaccaaagagatcacagttcattccggaagcactgtggaactgaagtgcagagcagaaggtaggccaagccctacagttacctggattcttgcaaaccaaacagttgtctcagaatcatcccagggaagtaggcaggctgtggtgacggttgacggaacattggtcctccacaatctcagtatttatgaccgtggcttttacaaatgtgtggccagcaacccaggtggccaggattcactgctggttaaaatacaagtcattgcagcaccacctgttattctagagcaaaggaggcaagtcattgtaggcacttggggtgaaagtttaaaactgccctgtactgcaaaaggaactcctcagcccagcgtttactgggtcctctctgatggcactgaagtgaaaccattacagtttaccaattccaagttgttcttattttcaaatgggactttgtatataagaaacctagcctcttcagacaggggcacttatgaatgcattgctaccagttccactggttcggagcgaagagtagtaatgcttacaatggaagagcgagtgaccagccccaggatagaagctgcatcccagaaaaggactgaagtgaattttggggacaaattactactgaactgctcagccactggggagcccaaaccccaaataatgtggaggttaccatccaaggctgtggtcgaccagcagcatagggtgggcagctggatccacgtctaccctaatggatccctgtttattggatcagtaacagaaaaagacagtggtgtctacttgtgtgtggcaagaaacaaaatgggggatgatctgatactgatgcatgttagcctaagactgaaacctgccaaaattgaccacaagcagtattttagaaagcaagtgctccatgggaaagatttccaagtagattgcaaagcttccggctccccagtgccagagatatcttggagtttgcctgatggaaccatgatcaacaatgcaatgcaagccgatgacagtggccacaggactaggagatatacccttttcaacaatggaactttatacttcaacaaagttggggtagcggaggaaggagattatacttgctatgcccagaacaccctagggaaagatgaaatgaaggtccacttaacagttataacagctgctccccggataaggcagagtaacaaaaccaacaagagaatcaaagctggagacacagctgtccttgactgtgaggtcactggggatcccaaaccaaaaatattttggttgctgccttccaatgacatgatttccttctccattgataggtacacatttcatgccaatgggtctttgaccatcaacaaagtgaaactgctcgattctggagagtacgtatgtgtagcccgaaatcccagtggggatgacaccaaaatgtacaaactggatgtggtctctaaacctccattaatcaatggtctgtatacaaacagaactgttattaaagccacagctgtgagacattccaaaaaacactttgactgcagagctgaagggacaccatctcctgaagtcatgtggatcatgccagacaatattttcctcacagccccatactatggaagcagaatcacagtccataaaaatggaaccttggaaattaggaatgtgaggctttcagattcagccgactttatctgtgtggcccgaaatgaaggtggagagagcgtgttggtagtacagttagaagtactggaaatgctgagaagaccgacatttagaaatccatttaatgaaaaaatagttgcccagctgggaaagtccacagcattgaattgctctgttgatggtaacccaccacctgaaataatctggattttaccaaatggcacacgattttccaatggaccacaaagttatcagtatctgatagcaagcaatggttcttttatcatttctaaaacaactcgggaggatgcaggaaaatatcgccgtgcagctaggaataaagttggctatattgagaaattagtcatattagaaattggccagaagccagttattcttacctatgcaccagggacagtaaaaggcatcagtggagaatctctatcactgcattgtgtgtctgatggaatccctaagccaaatatcaaatggactatgccaagtggttatgtagtagacaggcctcaaattaatgggaaatacatattgcatgacaatggcaccttagtcattaaagaagcaacagcttatgacagaggaaactatatctgtaaggctcaaaatagtgttggtcatacactgattactgttccagtaatgattgtagcctaccctccccgaattacaaatcgtccacccaggagtattgtcaccaggacaggggcagcctttcagctccactgtgtggccttgggagttcccaagccagaaatcacatgggagatgcctgaccactcccttctctcaacggcaagtaaagagaggacacatggaagtgagcagcttcacttacaaggtaccctagtcattcagaatccccaaacctccgattctgggatatacaaatgcacagcaaagaacccacttggtagtgattatgcagcaacgtatattcaagtaatctgacatgaaataataaagtc

SEQ ID NO: 750 - protein, 2617 aa, Homo sapiens
MKVKGRGITCLLVSFAVICLVATPGGKACPRRCACYMPTEVHCTFRYLTSIPDSIPPNVERINLGYNSLVRLMETDFSGLTKLELLMLHSNGIHTIPDKTFSDLQALQVRLMVLKMSYNKVRKLQKDTFYGLRSLTRLHMDHNNIEFINPEVFYGLNFLRLVHLEGNQLTKLHPDTFVSLSYLQIFKISFIKFLYLSDNFLTSLPQEMVSYMPDLDSLYLHGNPWTCDCHLKWLSDWIQEKPGIYIVLPDVIKCKKDRSPSSAQQCPLCMNPRTSKGKPLAMVSAAAFQCAKPTIDSSLKSKSLTILEDSSSAFISPQGFMAPFGSLTLNMTDQSGNEANMVCSIQKPSRTSPIAFTEENDYIVLNTSFSTFLVCNIDYGHIQPVWQILALYSDSPLILERSHLLSETPQLYYKYKQVAPKPEDIFTNIEADLRADPSWLMQDQISLQLNRTATTFSTLQIQYSSDAQITLPRAEMRPVKHKWTMISRDNNTKLEHTVLVGGTVGLNCPGQGDPTPHVDWLLADGSKVRAPYVSEDGRILIDKSGKLELQMADSFDTGVYHCISSNYDDADILTYRITVVEPLVEAYQENGIHHTVFIGETLDLPCHSTGIPDASISWVIPGNNVLYQSSRDKKVLNNGTLRILQVTPKDQGYYRCVAANPSGVDFLIFQVSVKMKGQRPLEHDGETEGSGLDESNPIAHLKEPPGAQLRTSALMEAEVGKHTSSTSKRHNYRELTLQRRGDSTHRRFRENRRHFPPSARRIDPQHWAALLEKAKKNAMPDKRENTTVSPPPVVTQLPNIPGEEDDSSGMLALHEEFMVPATKALNLPARTVTADSRTISDSPMTNINYGTEFSPVVNSQILPPEEPTDFKLSTAIKTTAMSKNINPTMSSQIQGTTNQHSSTVFPLLLGATEFQDSDQMGRGREHFQSRPPITVRTMIKDVNVKMLSSTTNKLLLESVNTTNSHQTSVREVSEPRHNHFYSHTTQILSTSTFPSDPHTAAHSQFPIPRNSTVNIPLFRRFGRQRKIGGRGRIISPYRTPVLRRHRYSIFRSTTRGSSEKSTTAFSATVLNVTCLSCLPRERLTTATAALSFPSAAPITFPKADIARVPSEESTTLVQNPLLLLENKPSVEKTTPTIKYFRTEISQVTPTGAVMTYAPTSIPMEKTHKVNASYPRVSSTNEAKRDSVITSSLSGAITKPPMTIIAITRFSRRKIPWQQNFVNNHNPKGRLRNQHKVSLQKSTAVMLPKTSPALPQRQSLPSHHTTTKTHNPGSLPTKKELPFPPLNPMLPSIISKDSSTKSIISTQTAIPATTPTFPASVITYETQTERSRAQTIQREQEPQKKNRTDPNISPDQSSGFTTPTAMTPPVLTTAETSVKPSVSAFTHSPPENTTGISSTISFHSRTLNLTDVIEELAQASTQTLKSTIASETTLSSKSHQSTTTRKAIIRHSTIPPFLSSSATLMPVPISPPFTQRAVTDNVATPISGLMTNTVVKLHESSRHNAKPQQLVAEVATSPKVHPNAKFTIGTTHFIYSNLLHSTPMPALTTVKSQNSKLTPSPWAENQFWHKPYSEIAEKGKKPEVSMLATTGLSEATTLVSDWDGQKNTKKSDFDKKPVQEATTSKLLPFDSLSRYIFEKPRIVGGKAASFTIPANSDAFLPCEAVGNPLPTIHWTRVPSGMSGLDLSKRKQNSRVQVLPNGTLSIQRVEIQDRGQYLCSASNLFGTDHLHVTLSVVSYPPRILERRTKEITVHSGSTVELKCRAEGRPSPTVTWILANQTVVSESSQGSRQAVVTVDGTLVLHNLSIYDRGFYKCVASNPGGQDSLLVKIQVIAAPPVILEQRRQVIVGTWGESLKLPCTAKGTPQPSVYWVLSDGTEVKPLQFTNSKLFLFSNGTLYIRNLASSDRGTYECIATSSTGSERRVVMLTMEERVTSPRIEAASQKRTEVNFGDKLLLNCSATGEPKPQIMWRLPSKAVVDQQHRVGSWIHVYPNGSLFIGSVTEKDSGVYLCVARNKMGDDLILMHVSLRLKPAKIDHKQYFRKQVLHGKDFQVDCKASGSPVPEISWSLPDGTMINNAMQADDSGHRTRRYTLFNNGTLYFNKVGVAEEGDYTCYAQNTLGKDEMKVHLTVITAAPRIRQSNKTNKRIKAGDTAVLDCEVTGDPKPKIFWLLPSNDMISFSIDRYTFHANGSLTINKVKLLDSGEYVCVARNPSGDDTKMYKLDVVSKPPLINGLYTNRTVIKATAVRHSKKHFDCRAEGTPSPEVMWIMPDNIFLTAPYYGSRITVHKNGTLEIRNVRLSDSADFICVARNEGGESVLVVQLEVLEMLRRPTFRNPFNEKIVAQLGKSTALNCSVDGNPPPEIIWILPNGTRFSNGPQSYQYLIASNGSFIISKTTREDAGKYRRAARNKVGYIEKLVILEIGQKPVILTYAPGTVKGISGESLSLHCVSDGIPKPNIKWTMPSGYVVDRPQINGKYILHDNGTLVIKEATAYDRGNYICKAQNSVGHTLITVPVMIVAYPPRITNRPPRSIVTRTGAAFQLHCVALGVPKPEITWEMPDHSLLSTASKERTHGSEQLHLQGTLVIQNPQTSDSGIYKCTAKNPLGSDYAATYIQVI

SEQ ID NO: 751 - DNA, 3772 bp, Homo sapiens
  CDS (251)..(2548)
cttctccgagtggggacattgctgacaatcccggcttcccgaggcggctaagaacaggcagtttgtgtcggctggctgcagatacccagaggcacaaagagaccgaagccacccggagggacccacggacggacagatggtaggcgcgaacccgagaggaccggcggaggctgagcaccgagagccgccaaggaagagaaactaaccacagccaagttaccccgccggctttccttcgctgcgctaaggaatgaaacccttccagctcgatctgctcttcgtctgcttcttcctcttcagtcaagagctgggcctccagaagagaggatgctgtctggtgctgggctacatggccaaggacaagtttcggagaatgaatgaaggccaagtctattccttcagccagcagccccaggaccaggtggtggtgtcgggacagccagtgacgctactttgcgccatccccgaatacgatggcttcgttctgtggatcaaggacggcttggctctgggtgtgggcagggacctctcaagttacccacagtacctggtggtagggaaccacctgtcaggggagcaccacctgaagatcctgagggcagagctgcaagacgatgcggtgtacgagtgccaggccatccaggccgccatccgctcccgccccgcacgcctcacagtcctggtgccgcctgatgaccccgtcatcctggggggccctgtgatcagcctgcgtgcgggggaccctctcaacctcacctgccacgcagacaatgccaagcctgcagcctccatcatctggttgcgaaagggagaggtcatcaatggggccacctactccaagaccctgcttcgggacggcaagcgggagagcatcgtcagcaccctcttcatctcccctggtgacgtggagaatggccagagcatcgtgtgtcgtgccaccaacaaagccatccccggaggaaaggagacgtcggtcaccattgacatccagcaccctccactggtcaacctctcggtggagccacagccagtgctggaggacaacgtcgtcactttccactgctctgcaaaggccaacccagctgtcacccagtacaggtgggccaagcggggccagatcatcaaggaggcatctggagaggtgtacaggaccacagtggactacacgtacttctcagagcccgtctcctgtgaggtgaccaacgccctgggcagcaccaacctcagccgcacggttgacgtctactttgggccccggatgaccacagaaccccaatccttgctcgtggatctgggctctgatgccatcttcagctgcgcctggaccggcaacccatccctgaccatcgtctggatgaagcggggctccggagtggtcctgagcaatgagaagaccctgaccctcaaatccgtgcgccaggaggacgcgggcaagtacgtgtgccgggctgtggtgccccgtgtgggagccggggagagagaggtgaccctgaccgtcaatggaccccccatcatctccagcacccagacccagcacgccctccacggcgagaagggccagatcaagtgcttcatccggagcacgccgccgccggaccgcatcgcctggtcctggaaggagaacgttctggagtcgggcacatcggggcgctatacggtggagaccatcagcaccgaggagggcgtcatctccaccctgaccatcagcaacatcgtgcgggccgacttccagaccatctacaactgcacggcctggaacagcttcggctccgacactgagatcatccggctcaaggagcaagagtctgtgccgatggccgtcatcattggggtggccgtaggagctggtgtggccttcctcgtccttatggcaaccatcgtggcgttctgctgtgcccgttcccagagaaatctcaaaggtgttgtgtcagccaaaaatgatatccgagtggaaattgtccacaaggaaccagcctctggtcgggagggtgaggagcactccaccatcaagcagctgatgatggaccggggtgaattccagcaagactcagtcctgaaacagctggaggtcctcaaagaagaggagaaagagtttcagaacctgaaggaccccaccaatggctactacagcgtcaacaccttcaaagagcaccactcaaccccgaccatctccctctccagctgccagcccgacctgcgtcctgcgggtaagcagcgtgtgcccacaggcatgtccttcaccaacatctacagcaccctgagcggccagggccgcctctacgactacgggcagcggtttgtgctgggcatgggcagctcgtccatcgagctttgtgagcgggagttccagagaggctccctcagcgacagcagctccttcctggacacgcagtgtgacagcagcgtcagcagcagcggcaagcaggatggctatgtgcagttcgacaaggccagcaaggcttctgcttcctcctcccaccactcccagtcctcgtcccagaactctgaccccagtcgacccctgcagcggcggatgcagactcacgtctaaggatcacacaccgcgggtggggacgggccagggaagaggtcagggcacgttctggttgtccagggacgaggggtactttgcagaggacaccagaattggccacttccaggacagcctcccagcgcctctgccactgccttccttcgaagctctgatcaagcacaaatctgggtccccaggtgctgtgtgccagaggtgggcgggtggggagacagacagaggctgcggctgagtgcgctgtgcttagtgctggacacccgtgtccccggccctttcctggaggcccctctaccacctgctctgcccacaggcacaagtggcagctataactctgctttcatgaaactgcggtccactctctggtctctctgtgggctctacccctcactgaccacaagctctacctacccctgtgcctgtgctcccatacagccctggggagaaggggatgacgtcttcccagcactgagctgccccagaaaccccggctccccactgctgctcatagcccataccctggaggttgacaagccagaaatggccttggctaaaggagcctctctctcaccaggctggccgggagcccacccccaatttgtttggtgttttgtgtccatactcttgcagttctgtccttggacttgatgccgctgaactctgcggtgggaccggtcccgtcagagcctggtgtactggggggagggagggaggagggagcctgtgctgacggagcacctcgccgggtgtgcccctcctgggctgtgtgaccccagcctccccacccacctcctgctttgtgtactcctcccctccccctcagcacaatcggagttcatataagaagtgcgggagcttctctggtcagggttctctgaacacttatggagagagtgcttcctgggaagtgtggcgtttgaaggggctggagggcaggtctttaagatggcgagactgcccttctcagctgataaacacaagaacggcgatcctgtcttcagtaaggctccacgagaagagaggaagtatatctacacctcaaccctcctagtcaccacctgaaataaatgttagggacactactccaacatgtttgttctgttcttttgttcctacaaagccacaggaagaacccaagagctcatagaatgcgttgggaacccaaggttctctgccctcctttgattcaatcatcctagacaataaaggcagttgatagctctg

SEQ ID NO: 752 - protein, 766 aa, Homo sapiens
MKPFQLDLLFVCFFLFSQELGLQKRGCCLVLGYMAKDKFRRMNEGQVYSFSQQPQDQVVVSGQPVTLLCAIPEYDGFVLWIKDGLALGVGRDLSSYPQYLVVGNHLSGEHHLKILRAELQDDAVYECQAIQAAIRSRPARLTVLVPPDDPVILGGPVISLRAGDPLNLTCHADNAKPAASIIWLRKGEVINGATYSKTLLRDGKRESIVSTLFISPGDVENGQSIVCRATNKAIPGGKETSVTIDIQHPPLVNLSVEPQPVLEDNVVTFHCSAKANPAVTQYRWAKRGQIIKEASGEVYRTTVDYTYFSEPVSCEVTNALGSTNLSRTVDVYFGPRMTTEPQSLLVDLGSDAIFSCAWTGNPSLTIVWMKRGSGVVLSNEKTLTLKSVRQEDAGKYVCRAVVPRVGAGEREVTLTVNGPPIISSTQTQHALHGEKGQIKCFIRSTPPPDRIAWSWKENVLESGTSGRYTVETISTEEGVISTLTISNIVRADFQTIYNCTAWNSFGSDTEIIRLKEQESVPMAVIIGVAVGAGVAFLVLMATIVAFCCARSQRNLKGVVSAKNDIRVEIVHKEPASGREGEEHSTIKQLMMDRGEFQQDSVLKQLEVLKEEEKEFQNLKDPTNGYYSVNTFKEHHSTPTISLSSCQPDLRPAGKQRVPTGMSFTNIYSTLSGQGRLYDYGQRFVLGMGSSSIELCEREFQRGSLSDSSSFLDTQCDSSVSSSGKQDGYVQFDKASKASASSSHHSQSSSQNSDPSRPLQRRMQTHV

SEQ ID NO: 753 - DNA, 1806 bp, Homo sapiens
  CDS (1)..(1644)
aacaaagccatccccggaggaaaggagacgtcggtcaccattgacatccagcaccctccactggtcaacctctcggtggagccacagccagtgctggaggacaacgtcgtcactttccactgctctgcaaaggccaacccagctgtcacccagtacaggtgggccaagcggggccagatcatcaaggaggcatctggagaggtgtacaggaccacagtggactacacgtacttctcagagcccgtctcctgtgaggtgaccaaagccctgggcagcaccaacctcagccgcacggttgacgtctactttgggccccggatgaccacagaaccccaatccttgctcgtggatctgggctctgatgccatcttaagctgcgcctggaccggcaacccatccctgaccatcgtctggatgaagcggggctccggagtggtcctgagcaatgagaagaccctgaccctcaaatccgtgcgccaggaggacgcgggcaagtacgtgtgccgggctgtggtgccccgtgtgggagccggggagagagaggtgaccctgaccgtcaatggaccccccatcatctccagcacccagacccagcacgccctccacggcgagaagggccagatcaagtgcttcatccggagcacgccgccgccggaccgcatcgcctggtcctggaaggagaacgttctggagtcgggcacatcggggcgctatacggtggagaccatcagcaccgaggagggcgtcatctccaccctgaccatcagcaacatcgtgcgggccgacttccagaccatctacaactgcacggcctggaacagcttcggctccgacactgagatcatccggctcaaggagcaaggttcggaaatgaagtcgggagccgggctggaagcagagtctgtgccgatggccgtcatcattggggtggccgtaggagctggtgtggccttcctcgtccttatggcaaccatcgtggcgttctgctgtgcccgttcccagagaaatctcaaaggtgttgtgtcagccaaaaatgatatccgagtggaaattgtccacaaggaaccagcctctggtcgggagggtgaggagcactccaccatcaagcagctgatgatggaccggggtgaattccagcaagactcagtcctgaaacagctggaggtcctcaaagaagaggagaaagagtttcagaacctgaaggaccccaccaatggctactacagcgtcaacaccttcaaagagcaccactcaaccccgaccatctccctctccagctgccagcccgacctgcgtcctgcgggcaagcagcgtgtgcccacaggcatgtccttcaccaacatctacagcaccctgagcggccagggccgcctctacgactacgggcagcggtttgtgctgggcatgggcagctcgtccatcgagctttgtgagcgggagttccagagaggctccctcagcgacagcagctccttcctggacacgcagtgtgacagcagcgtcagcagcagcggcaagcaggatggctatgtgcagttcgacaaggccagcaaggcttctgcttcctcctcccaccactcccagtcctcgtcccagaactctgaccccagtcgacccctgcagcggcggatgcagactcacgtctaaggatcacacaccgcgggtggggacgggccagggaagaggtcagggcacgttctggttgtccagggactgtggggtactttacagaggacaccagaatggcccacttccaggacagcctcccagcgcctctgccactgccttccttcgaagctctgatca

SEQ ID NO: 754 - protein, 548 aa, Homo sapiens
NKAIPGGKETSVTIDIQHPPLVNLSVEPQPVLEDNVVTFHCSAKANPAVTQYRWAKRGQIIKEASGEVYRTTVDYTYFSEPVSCEVTKALGSTNLSRTVDVYFGPRMTTEPQSLLVDLGSDAILSCAWTGNPSLTIVWMKRGSGVVLSNEKTLTLKSVRQEDAGKYVCRAVVPRVGAGEREVTLTVNGPPIISSTQTQHALHGEKGQIKCFIRSTPPPDRIAWSWKENVLESGTSGRYTVETISTEEGVISTLTISNIVRADFQTIYNCTAWNSFGSDTEIIRLKEQGSEMKSGAGLEAESVPMAVIIGVAVGAGVAFLVLMATIVAFCCARSQRNLKGVVSAKNDIRVEIVHKEPASGREGEEHSTIKQLMMDRGEFQQDSVLKQLEVLKEEEKEFQNLKDPTNGYYSVNTFKEHHSTPTISLSSCQPDLRPAGKQRVPTGMSFTNIYSTLSGQGRLYDYGQRFVLGMGSSSIELCEREFQRGSLSDSSSFLDTQCDSSVSSSGKQDGYVQFDKASKASASSSHHSQSSSQNSDPSRPLQRRMQTHV

SEQ ID NO: 755 - DNA, 1630 bp, Homo sapiens
  CDS (2)..(1630)
caccggatccaccaacaaagccatccccggaggaaaggagacgtcggtcaccattgacatccagcaccctccactggtcaacctctcggtggagccacagccagtgctggaggacaacgtcgtcactttccactgctctgcaaaggccaacccagctgtcacccagtacaggtgggccaagcggggccagatcatcaaggaggcatctggagaggtgtacaggaccacagtggactacacgtacttctcagagcccgtctcctgtgaggtgaccaacgccctgggcagcaccaacctcagccgcacggttgacgtctactttgggccccggatgaccacagaaccccaatccttgctcgtggatctgggctctgatgccatcttcagctgcgcctggaccggcaacccatccctgaccatcgtctggatgaagcggggctccggagtggtcctgagcaatgagaagaccctgaccctcaaatccgtgcgccaggaggacgcgggcaagtacgtgtgccgggctgtggtgccccgtgtgggagccggggagagagaggtgaccctgaccgtcaatggaccccccatcatctccagcacccagacccagcacgccctccacggcgagaagggccagatcaagtgcttcatccggagcacgccgccgccggaccgcatcgcctggtcctggaaggagaacgttctggagtcgggcacatcggggcgctatacggtggagaccatcagcaccgaggagggcgtcatctccaccctgaccatcagcaacatcgtgcgggccgacttccagaccatctacaactgcacggcctggaacagcttcggctccgacactgagatcatccggctcaaggagcaagagtctgtgccgatggccgtcatcattggggtggccgtaggagctggtgtggccttcctcgtccttatggcaaccatcgtggcgttctgctgtgcccgttcccagagaaatctcaaaggtgttgtgtcagccaaaaatgatatccgagtggaaattgtccacaaggaaccagcctctggtcgggagggtgaggagcactccaccatcaagcagctgatgatggaccggggtgaattccagcaagactcagtcctgaaacagctggaggtcctcaaagaagaggagaaagagtttcagaacctgaaggaccccaccaatggctactacagcgtcaacaccttcaaagagcaccactcaaccccgaccatctccctctccagctgccagcccgacctgcgtcctgcgggtaagcagcgtgtgcccacaggcatgtccttcaccaacatctacagcaccctgagcggccagggccgcctctacgactacgggcagcggtttgtgctgggcatgggcagctcgtccatcgagctttgtgagcgggagttccagagaggctccctcagcgacagcagctccttcctggacacgcagtgtgacagcagcgtcagcagcagcggcaagcaggatggctatgtgcagttcgacaaggccagcaaggcttctgcttcctcctcccaccactcccagtcctcgtcccagaactctgaccccagtcgacccctgcagcggcggatgcagactcacgtccccgggggc

SEQ ID NO: 756 - protein, 543 aa, Homo sapiens
TGSTNKAIPGGKETSVTIDIQHPPLVNLSVEPQPVLEDNVVTFHCSAKANPAVTQYRWAKRGQIIKEASGEVYRTTVDYTYFSEPVSCEVTNALGSTNLSRTVDVYFGPRMTTEPQSLLVDLGSDAIFSCAWTGNPSLTIVWMKRGSGVVLSNEKTLTLKSVRQEDAGKYVCRAVVPRVGAGEREVTLTVNGPPIISSTQTQHALHGEKGQIKCFIRSTPPPDRIAWSWKENVLESGTSGRYTVETISTEEGVISTLTISNIVRADFQTIYNCTAWNSFGSDTEIIRLKEQESVPMAVIIGVAVGAGVAFLVLMATIVAFCCARSQRNLKGVVSAKNDIRVEIVHKEPASGREGEEHSTIKQLMMDRGEFQQDSVLKQLEVLKEEEKEFQNLKDPTNGYYSVNTFKEHHSTPTISLSSCQPDLRPAGKQRVPTGMSFTNIYSTLSGQGRLYDYGQRFVLGMGSSSIELCEREFQRGSLSDSSSFLDTQCDSSVSSSGKQDGYVQFDKASKASASSSHHSQSSSQNSDPSRPLQRRMQTHVPGG

SEQ ID NO: 757 - DNA, 1036 bp, Homo sapiens
  CDS (2)..(1036)
caccggatccaccaacaaagccatccccggaggaaaggagacgtcggtcaccattgacatccagcaccctccactggtcaacctctcggtggagccacagccagtgctggaggacaacgtcgtcactttccactgctctgcaaaggccaacccagctgtcacccagtacaggtgggccaagcggggccagatcatcaaggaggcatctggagaggtgtacaggaccacagtggactacacgtacttctcagagcccgtctcctgtgaggtgaccaacgccctgggcagcaccaacctcagccgcacggttgacgtctactttgggccccggatgaccacagaaccccaatccttgctcgtggatctgggctctgatgccatcttcagctgcgcctggaccggcaacccatccctgaccatcgtctggatgaagcggggctccggagtggtcctgagcaatgagaagaccctgaccctcaaatccgtgcgccaggaggacgcgggcaagtacgtgtgccgggctgtggtgccccgtgtgggagccggggagagagaggtgaccctgaccgtcaatggaccccccatcatctccagcacccagacccagcacgccctccacggcgagaagggccagatcaagtgcttcatccggagcacgccgccgccggaccgcatcgcctggtcctggaaggagaacgttctggagtcgggcacatcggggcgctatacggtggagaccatcagcaccgaggagggcgtcatctccaccctgaccatcagcaacatcgtgcgggccgacttccagaccatctacaactgcacggcctggaacagcttcggctccgacactgagatcatccggctcaaggagcaagagtctgtgccgatggccgtcatcattggggtggccgtaggagctggtgtggccttcctcgtccttatggcaaccatcgtggcgttctgctgtgcccgttcccagagaaatctcaaaggtgttgtgtcagccaaaaatgatatccgagtggaacccgggggc

SEQ ID NO: 758 - protein, 345 aa, Homo sapiens
TGSTNKAIPGGKETSVTIDIQHPPLVNLSVEPQPVLEDNVVTFHCSAKANPAVTQYRWAKRGQIIKEASGEVYRTTVDYTYFSEPVSCEVTNALGSTNLSRTVDVYFGPRMTTEPQSLLVDLGSDAIFSCAWTGNPSLTIVWMKRGSGVVLSNEKTLTLKSVRQEDAGKYVCRAVVPRVGAGEREVTLTVNGPPIISSTQTQHALHGEKGQIKCFIRSTPPPDRIAWSWKENVLESGTSGRYTVETISTEEGVISTLTISNIVRADFQTIYNCTAWNSFGSDTEIIRLKEQESVPMAVIIGVAVGAGVAFLVLMATIVAFCCARSQRNLKGVVSAKNDIRVEPGG

SEQ ID NO: 759 - DNA, 1072 bp, Homo sapiens
  CDS (2)..(1072)
caccggatccaccaacaaagccatccccggaggaaaggagacgtcggtcaccattgacatccagcaccctccactggtcaacctctcggtggagccacagccagtgctggaggacaacgtcgtcactttccactgctctgcaaaggccaacccagctgtcacccagtacaggtgggccaagcggggccagatcatcaaggaggcatctggagaggtgtacaggaccacagtggactacacgtacttctcagagcccgtctcctgtgaggtgaccaacgccctgggcagcaccaacctcagccgcacggttgacgtctactttgggccccggatgaccacagaaccccaatccttgctcgtggatctgggctctgatgccatcttcagctgcgcctggaccggcaacccatccctgaccatcgtctggatgaagcggggctccggagtggtcctgagcaatgagaagaccctgaccctcaaatccgtgcgccaggaggacgcgggcaagtacgtgtgccgggctgtggtgccccgtgtgggagccggggagagagaggtgaccctgaccgtcaatggaccccccatcatctccagcacccagacccagcacgccctccacggcgagaagggccagatcaagtgcttcatccggagcacgccgccgccggaccgcatcgcctggtcctggaaggagaacgttctggagtcgggcacatcggggcgctatacggtggagaccatcagcaccgaggagggcgtcatctccaccctgaccatcagcaacatcgtgcgggccgacttccagaccatctacaactgcacggcctggaacagcttcggctccgacactgagatcatccggctcaaggagcaaggttcggaaatgaagtcgggagccgggctggaagcagagtctgtgccgatggccgtcatcattggggtggccgtaggagctggtgtggccttcctcgtccttatggcaaccatcgtggcgttctgctgtgcccgttcccagagaaatctcaaaggtgttgtgtcagccaaaaatgatatccgagtggaacccgggggc

SEQ ID NO: 760 - protein, 357 aa, Homo sapiens
TGSTNKAIPGGKETSVTIDIQHPPLVNLSVEPQPVLEDNVVTFHCSAKANPAVTQYRWAKRGQIIKEASGEVYRTTVDYTYFSEPVSCEVTNALGSTNLSRTVDVYFGPRMTTEPQSLLVDLGSDAIFSCAWTGNPSLTIVWMKRGSGVVLSNEKTLTLKSVRQEDAGKYVCRAVVPRVGAGEREVTLTVNGPPIISSTQTQHALHGEKGQIKCFIRSTPPPDRIAWSWKENVLESGTSGRYTVETISTEEGVISTLTISNIVRADFQTIYNCTAWNSFGSDTEIIRLKEQGSEMKSGAGLEAESVPMAVIIGVAVGAGVAFLVLMATIVAFCCARSQRNLKGVVSAKNDIRVEPGG

SEQ ID NO: 761 - DNA, 616 bp, Homo sapiens
  CDS (2)..(616)
caccggatccgaaattgtccacaaggaaccagcctctggtcgggagggtgaggagcactccaccatcaagcagctgatgatggaccggggtgaattccagcaagactcagtcctgaaacagctggaggtcctcaaagaagaggagaaagagtttcagaacctgaaggaccccaccaatggctactacagcgtcaacaccttcaaagagcaccactcaaccccgaccatctccctctccagctgccagcccgacctgcgtcctgcgggcaagcagcgtgtgcccacaggcatgtccttcaccaacatctacagcaccctgagcggccagggccgcctctacgactacgggcagcggtttgtgctgggcatgggcagctcgtccatcgagctttgtgagcgggagttccagagaggctccctcagcgacagcagctccttcctggacacgcagtgtgacagcagcgtcagcagcagcggcaagcaggatggctatgtgcagttcgacaaggccagcaaggcttctgcttcctcctcccaccactcccagtcctcgtcccagaactctgaccccagtcgacccctgcagcggcggatgcagactcacgtccccgggggc

SEQ ID NO: 762 - protein, 205 aa, Homo sapiens
TGSEIVHKEPASGREGEEHSTIKQLMMDRGEFQQDSVLKQLEVLKEEEKEFQNLKDPTNGYYSVNTFKEHHSTPTISLSSCQPDLRPAGKQRVPTGMSFTNIYSTLSGQGRLYDYGQRFVLGMGSSSIELCEREFQRGSLSDSSSFLDTQCDSSVSSSGKQDGYVQFDKASKASASSSHHSQSSSQNSDPSRPLQRRMQTHVPGG

SEQ ID NO: 763 - DNA, 1666 bp, Homo sapiens
  CDS (2)..(1666)
caccggatccaccaacaaagccatccccggaggaaaggagacgtcggtcaccattgacatccagcaccctccactggtcaacctctcggtggagccacagccagtgctggaggacaacgtcgtcactttccactgctctgcaaaggccaacccagctgtcacccagtacaggtgggccaagcggggccagatcatcaaggaggcatctggagaggtgtacaggaccacagtggactacacgtacttctcagagcccgtctcctgtgaggtgaccaacgccctgggcagcaccaacctcagccgcacggttgacgtctactttgggccccggatgaccacagaaccccaatccttgctcgtggatctgggctctgatgccatcttcagctgcgcctggaccggcaacccatccctgaccatcgtctggatgaagcggggctccggagtggtcctgagcaatgagaagaccctgaccctcaaatccgtgcgccaggaggacgcgggcaagtacgtgtgccgggctgtggtgccccgtgtgggagccggggagagagaggtgaccctgaccgtcaatggaccccccatcatctccagcacccagacccagcacgccctccacggcgagaagggccagatcaagtgcttcatccggagcacgccgccgccggaccgcatcgcctggtcctggaaggagaacgttctggagtcgggcacatcggggcgctatacggtggagaccatcagcaccgaggagggcgtcatctccaccctgaccatcagcaacatcgtgcgggccgacttccagaccatctacaactgcacggcctggaacagcttcggctccgacactgagatcatccggctcaaggagcaaggttcggaaatgaagtcgggagccgggctggaagcagagtctgtgccgatggccgtcatcattggggtggccgtaggagctggtgtggccttcctcgtccttatggcaaccatcgtggcgttctgctgtgcccgttcccagagaaatctcaaaggtgttgtgtcagccaaaaatgatatccgagtggaaattgtccacaaggaaccagcctctggtcgggagggtgaggagcactccaccatcaagcagctgatgatggaccggggtgaattccagcaagactcagtcctgaaacagctggaggtcctcaaagaagaggagaaagagtttcagaacctgaaggaccccaccaatggctactacagcgtcaacaccttcaaagagcaccactcaaccccgaccatctccctctccagctgccagcccgacctgcgtcctgcgggcaagcagcgtgtgcccacaggcatgtccttcaccaacatctacagcaccctgagcggccagggccgcctctacgactacgggcagcggtttgtgctgggcatgggcagctcgtccatcgagctttgtgagcgggagttccagagaggctccctcagcgacagcagctccttcctggacacgcagtgtgacagcagcgtcagcagcagcggcaagcaggatggctatgtgcagttcgacaaggccagcaaggcttctgcttcctcctcccaccactcccagtcctcgtcccagaactctgaccccagtcgacccctgcagcggcggatgcagactcacgtccccgggggc

SEQ ID NO: 764 - protein, 555 aa, Homo sapiens
TGSTNKAIPGGKETSVTIDIQHPPLVNLSVEPQPVLEDNVVTFHCSAKANPAVTQYRWAKRGQIIKEASGEVYRTTVDYTYFSEPVSCEVTNALGSTNLSRTVDVYFGPRMTTEPQSLLVDLGSDAIFSCAWTGNPSLTIVWMKRGSGVVLSNEKTLTLKSVRQEDAGKYVCRAVVPRVGAGEREVTLTVNGPPIISSTQTQHALHGEKGQIKCFIRSTPPPDRIAWSWKENVLESGTSGRYTVETISTEEGVISTLTISNIVRADFQTIYNCTAWNSFGSDTEIIRLKEQGSEMKSGAGLEAESVPMAVIIGVAVGAGVAFLVLMATIVAFCCARSQRNLKGVVSAKNDIRVEIVHKEPASGREGEEHSTIKQLMMDRGEFQQDSVLKQLEVLKEEEKEFQNLKDPTNGYYSVNTFKEHHSTPTISLSSCQPDLRPAGKQRVPTGMSFTNIYSTLSGQGRLYDYGQRFVLGMGSSSIELCEREFQRGSLSDSSSFLDTQCDSSVSSSGKQDGYVQFDKASKASASSSHHSQSSSQNSDPSRPLQRRMQTHVPGG

SEQ ID NO: 765 - DNA, 891 bp, Homo sapiens
  CDS (1)..(891)
aacaaagccatccccggaggaaaggagacgtcggtcaccattgacatccagcaccctccactggtcaacctctcggtggagccacagccagtgctggaggacaacgtcgtcactttccactgctctgcaaaggccaacccagctgtcacccagtacaggtgggccaagcggggccagatcatcaaggaggcatctggagaggtgtacaggaccacagtggactacacgtacttctcagagcccgtctcctgtgaggtgaccaacgccctgggcagcaccaacctcagccgcacggttgacgtctactttgggccccggatgaccacagaaccccaatccttgctcgtggatctgggctctgatgccatcttcagctgcgcctggaccggcaacccatccctgaccatcgtctggatgaagcggggctccggagtggtcctgagcaatgagaagaccctgaccctcaaatccgtgcgccaggaggacgcgggcaagtacgtgtgccgggctgtggtgccccgtgtgggagccggggagagagaggtgaccctgaccgtcaatggaccccccatcatctccagcacccagacccagcacgccctccacggcgagaagggccagatcaagtgcttcatccggagcacgccgccgccggaccgcatcgcctggtcctggaaggagaacgttctggagtcgggcacatcggggcgctatacggtggagaccatcagcaccgaggagggcgtcatctccaccctgaccatcagcaacatcgtgcgggccgacttccagaccatctacaactgcacggcctggaacagcttcggctccgacactgagatcatccggctcaaggagcaaggttcggaaatgaagtcgggagccgggctg

SEQ ID NO: 766 - protein, 297 aa, Homo sapiens
NKAIPGGKETSVTIDIQHPPLVNLSVEPQPVLEDNVVTFHCSAKANPAVTQYRWAKRGQIIKEASGEVYRTTVDYTYFSEPVSCEVTNALGSTNLSRTVDVYFGPRMTTEPQSLLVDLGSDAIFSCAWTGNPSLTIVWMKRGSGVVLSNEKTLTLKSVRQEDAGKYVCRAVVPRVGAGEREVTLTVNGPPIISSTQTQHALHGEKGQIKCFIRSTPPPDRIAWSWKENVLESGTSGRYTVETISTEEGVISTLTISNIVRADFQTIYNCTAWNSFGSDTEIIRLKEQGSEMKSGAGL

SEQ ID NO: 767 - DNA, 1806 bp, Homo sapiens
  CDS (1)..(1644)
aacaaagccatccccggaggaaaggagacgtcggtcaccattgacatccagcaccctccactggtcaacctctcggtggagccacagccagtgctggaggacaacgtcgtcactttccactgctctgcaaaggccaacccagctgtcacccagtacaggtgggccaagcggggccagatcatcaaggaggcatctggagaggtgtacaggaccacagtggactacacgtacttctcagagcccgtctcctgtgaggtgaccaaagccctgggcagcaccaacctcagccgcacggttgacgtctactttgggccccggatgaccacagaaccccaatccttgctcgtggatctgggctctgatgccatcttaagctgcgcctggaccggcaacccatccctgaccatcgtctggatgaagcggggctccggagtggtcctgagcaatgagaagaccctgaccctcaaatccgtgcgccaggaggacgcgggcaagtacgtgtgccgggctgtggtgccccgtgtgggagccggggagagagaggtgaccctgaccgtcaatggaccccccatcatctccagcacccagacccagcacgccctccacggcgagaagggccagatcaagtgcttcatccggagcacgccgccgccggaccgcatcgcctggtcctggaaggagaacgttctggagtcgggcacatcggggcgctatacggtggagaccatcagcaccgaggagggcgtcatctccaccctgaccatcagcaacatcgtgcgggccgacttccagaccatctacaactgcacggcctggaacagcttcggctccgacactgagatcatccggctcaaggagcaaggttcggaaatgaagtcgggagccgggctggaagcagagtctgtgccgatggccgtcatcattggggtggccgtaggagctggtgtggccttcctcgtccttatggcaaccatcgtggcgttctgctgtgcccgttcccagagaaatctcaaaggtgttgtgtcagccaaaaatgatatccgagtggaaattgtccacaaggaaccagcctctggtcgggagggtgaggagcactccaccatcaagcagctgatgatggaccggggtgaattccagcaagactcagtcctgaaacagctggaggtcctcaaagaagaggagaaagagtttcagaacctgaaggaccccaccaatggctactacagcgtcaacaccttcaaagagcaccactcaaccccgaccatctccctctccagctgccagcccgacctgcgtcctgcgggtaagcagcgtgtgcccacaggcatgtccttcaccaacatctacagcaccctgagcggccagggccgcctctacgactacgggcagcggtttgtgctgggcatgggcagctcgtccatcgagctttgtgagcgggagttccagagaggctccctcagcgacagcagctccttcctggacacgcagtgtgacagcagcgtcagcagcagcggcaagcaggatggctatgtgcagttcgacaaggccagcaaggcttctgcttcctcctcccaccactcccagtcctcgtcccagaactctgaccccagtcgacccctgcagcggcggatgcagactcacgtctaaggatcacacaccgcgggtggggacgggccagggaagaggtcagggcacgttctggttgtccagggactgtggggtactttacagaggacaccagaatggcccacttccaggacagcctcccagcgcctctgccactgccttccttcgaagctctgatca

SEQ ID NO: 768 - protein, 548 aa, Homo sapiens; identical to SEQ ID NO: 754

SEQ ID NO: 769 - DNA, 8250 bp, Homo sapiens
  CDS (4)..(1422)
accatgcggctgggcagtcctggactgctcttcctgctcttcagcagccttcgagctgatactcaggagaaggaagtcagagcgatggtaggcagcgacgtggagctcagctgcgcttgccctgaaggaagccgttttgatttaaatgatgtttacgtatattggcaaaccagtgagtcgaaaaccgtggtgacctaccacatcccacagaacagctccttggaaaacgtggacagccgctaccggaaccgagccctgatgtcaccggccggcatgctgcggggcgacttctccctgcgcttgttcaacgtcaccccccaggacgagcagaagtttcactgcctggtgttgagccaatccctgggattccaggaggttttgagcgttgaggttacactgcatgtggcagcaaacttcagcgtgcccgtcgtcagcgccccccacagcccctcccaggatgagctcaccttcacgtgtacatccataaacggctaccccaggcccaacgtgtactggatcaataagacggacaacagcctgctggaccaggctctgcagaatgacaccgtcttcttgaacatgcggggcttgtatgacgtggtcagcgtgctgaggatcgcacggacccccagcgtgaacattggctgctgcatagagaacgtgcttctgcagcagaacctgactgtcggcagccagacaggaaatgacatcggagagagagacaagatcacagagaatccagtcagtaccggcgagaaaaacgcggccacgtggagcatcctggctgtcctgtgcctgcttgtggtcgtggcggtggccataggctgggtgtgcagggaccgatgcctccaacacagctatgcaggtgcctgggctgtgagtccggagacagagctcactggtgagtttgccgtgggaagcagcaggttctggggggcccaggggaggcttggctgccagctgtctttcagagtttcaaaaaactttcaaaaggcaaaagtcccttgccttgaacaactgttgttcctggagacgcagcgaagccctcgatggtgcgcatggcatttcctgcagcctccccttggcatgggatggcatcctggtgtgcactttgtcacactgcgatgggattttcccaacatgcacagaagcagagagacgagtgctagacccccgcgctccccagtgcccagccccgaccagggtgtccagggcgggtccaggcaccggcgcccagcccccatggggtgtccggagtgggtccaggcaccggcgcccagcccccgtggggtgtccagggcgggtccaggcaccggcgcccagcccctgtggggtgtccggagtgggtccgggcaccgccagcttctctctgtggcagccactcctgcagctctcgtttgcccctcagttccaggagcaacatagatgtggattcctgtccaatttgggaaaaatgtccacacacggtcacccacctggcaggtgcctctggctgcaaggggcgctgggcttcgcaggcaggccagccgggctccccgccatgggccaggatcccctccgagccctgtttgccgcccaggagaaggggttccccggggacagtgggctcagggtgtgcgcagccaccatgctgtggtgtcacctgtggacccaggcgagctgatggccgaccgcagaaacgcacttccaaggccaggtcggcccatccagatgatgcaggaacacagcttgctaaaaacacggccggcctgttcccgtcggagccagtcgaagttccctgaacaggccgctgtttccgaagctttaaaccctgtgtttccaccaagctgagtcctgagaaaaccgacgtctgcctgcagaagggaaaggggtgcttcatgttcctctctctccttcatctcccttccaaggccacgtttgaccggagctcaccgcccagagcgtggacagggcttccgtgagacgccaccgtgagaggccaggtggcagcttgagcatggactcccagactgcaggggagcacttggggcagcccccagaaggaccactgctggatcccagggagaacctgctggcgttggctgtgatcctggaatgaggccctttcaaaagcgtcatccacaccaaaggcaaatgtccccaagtgagtgggctccccgctgtcactgccagtcacccacaggaagggactggtgatgggctgtctctacccggagcgtgcgggattcagcaccaggctcttcccagtaccccagacccactgtgggtcttcccgtgggatgcgggatcctgagaccgaagggtgtttggtttaaaaagaagactgggcgtccgctcttccaggacggcctctgtgctgctggggtcacgcgaggctgtttgcaggggacacggtcacaggagctcttctgccctgaacgctcccaacctgcctcccgcccggaagccacaggacccactcatgtgtgtgcccacaagtgtagttagccgtccacaccgaggagcccccggaagtccccactgggcttcagtgtcctctgccacattccctgggaggaacaatgtccctcggctgttccggtgaaaagttgagccacctttggaagacgcacgggtggagtttgccagaagaaaggctgtgccagggccgtgtttggctacaggggctgccggggctcttggctctgcagcgagaaagacacagcccagcagggctggagacgcccatgtccagcaggcgcaggcctggcaacacggtccccagagtcctgagcagcagttaggtgcatggagagggtatcacctggtggccacagtcccccttctcacctcagcaatgatccccaaagtgagaggtggctcccccggcccccaccaccctcagcagccccaccccactcaaccctgagggtccccagggtcctgatgaagacctccgaccccagcgccaggctcctcggagcccaacagtcccaagggggcaggagacggggtggtccagtgctgaggggtacagccctgggccctgaccagccccggcacctgccatgctggttcccggaatgaatcagctgctgactgtctccagaagggctggaaaggatgctgccaggtgacccgaggtgcactcgccccagggagatggagtagacagcctggcctggccctcgggacacattgtctgccccggggctatgggcaaatgcccctccttcttacttcccagaatcccctgacattcccagggtcagccaggacctgttacagccctggtcacttggaactgacagctgtgtgaggcctgcacttctcagacccagacttagaacaaaaggaggagtgaggactcaaggctacaatgaggttccagtacttgttacaagaaattggttttctgcaaaaaaagtccctacctgagcctttaggtgaatgtgggatccactcccgcttttaacatgaaagcattagaagatgtgtggtgtttataaaagaacagttgtcatcaccgggcattgattggcagggacaaggagctgcttgggtgtggaaagttggggcgttggaaagtgggctgtggtgcccatttgcagtgactgtgaagtgactccaggacggacctgcgggggcacccagaggtcctaagccccaggactgagggtcgtgcatcaccactcgggtgtcccgggaggtgccctgggcccggggacctcacaggcaggacggcgacactaatgcagggagagggagtctggccccagcttttcctatcagaggcgattttccttcaccaggggatgggcaggaaagaggcaggggccccagaagcttctgtccctcatgcctgagggcacgggggacacttggaggctgctgtcaccactgtgcgtccaaggccatgctctctgcgggtcagtgcctgagtctcgcctccctgctggtccctgaagccccctcagaagccctgcctgtcacgtcggcatttgtgagacctaccctgtaacgcctgcccctctcagcccaacatcagcttcctctttctcccttgctgtagacaggctggattccagtgttgggacagccatctccagaaacctgacttaagagagtaagatgcaaatcgtgcctgtatccagtggctttggtgggtgcagggagtcttgggcacagccagctcagctgtctgtggtatgagcaggaacaggtgccactcctgctcaggggaccctgccctacaccaggctgttccgtccccctggaggacatggggccaggtctggaggcattttgggttgtcacagctgggggctgttcctcggcttcagcgggtggaagcctcagatgctgttcaacatcttctggacacgggaggccccgacagagagaagcgtccacccgcaagtccacagtctgaggtctcccctcagagaccctgccctgcacacccacctccagccaaaggtcctgcctgccccagggctcaggggaaccttgccggtctgtggaacaggagaggggactctcgccagctgcaccaccctgcacgtagtaggtgtgcggtaaacatccaccagggaggctccagtcaaggctggcagatggggcggtccatccctagggcaggtgacagaagggaaaaggctgcctgctggcccccgagccaggtagcacatgcttgtgcctcagtttcccctcctgtaaagtgaggcgctggatccaggttctgtctactgggctctgcagcttggacgctcctaagaccaagcgacccaccctggggagggcagctatggctttggaatagctgtccaggcccgggtgcctccaagacggccaccacaccctgcctgtgctgcaggggtgcaggggtaaggggcaagactccagaggcctcctctctgcatctccttgtcttcagtggccggaggtgaggcctgagctcaggggaggggcttctgccacgaaccctatggcggggcacagcacacttttcccagggaggacccctgggccccctgcattatccccagcggagtgtggggtcaccttccaagagcgacattgagaagctccagctctaggagtgtgcagactcttaaccaggcaggcccaggccctggggcacacaaaggcggggcctgctctccccagctgcccctgccaatgggggctggactgtcctaccctcctcccttctacctccccactgtcttccctctccactgtcaccactgcctccctcttccactgtcctccatgcactgccctccctccaccttcccccacccccaccactccccatgctgtccccaggctccccccgctctcccccctccccactgtccccctccccatgctgtacccagctcaccccgctctcccctctccccactgtcccccctcccactccccatgctgtccccagctcaccctacatggacttggcgatgtccttccatggctcaccggtctgaatttccatgatgagccgggcctgcagctttgctcccctatccctgcccaggctgcagctgtccatgcagggagcgagctccagcacctgcggagtccttccgtgggggcctctccgtgccacagcagccagggacctcaggtgcctgtgcatgacaccaccgcccatcctcatcctgagccagcctctcaggatcaggacttggtttggcggcgttaaccttagagcctgcaaggggcttcctcctggtgggtctggccgtagcctggggaggccacagctccaggccactccagacctcccttcctctgggccttccatgtggtggcaaccaccgcagctgtaagggagggaaaatggagcgtttgttctcgggctgggctggggtctgggggaagccatgggcgtgaagactggagtattatttgatggagaagcggccactcctggagaccggcggcaaacacagaagcacagcgtggaaggtgctggtgtcagcccacacgggtgatggggtcagactcaggagtcacactcaggagtcaccaggctcaaagggcccaggcaccgcaagtcctgctcagccccagacacaatgcattcctgttgccctcgccctcagccaggccccacgcaggccagggagcactggcaaagcttggcaaccctctgggggccagccttcatccaggccgaaggtggtcagtggcccaccatggcccaggtagaaaactcacggattaagatttcatgcccgactccaaaggcaagagactttattattttattttttttgagccagagtatcgctctgtcacctaggctggagtgcaatctctgctcattgcaacatctgcctcccgaactcaagcaattctgcctcagcctcccaagtagctgggattacaggtgtgcgccaccatgcccaggtaattgtatttttagtagagacagggtttcaccatgttggtcaggctggtttcaaactcctgacctcaaatgatctgcccacctcgacctcccaaagtgctgggattacaggtgcgagccaccgcacctggctaccagacacttcagagttacaggttagtttttctttttcttttatttttttttttttggcggaggtgcagggggagttaaacaaacaaacaaaataaacaggccgggtgcggtggctcatgcctgtaatcccagcactttaggaggcctaggtgggtggatcacgagatcaggggttcaagaccagcctggccgagatggtaaaaccccgtctccactaaaaatacaaaaattggccaggcacggtggctcacacctgtaatcccagtactttgggaggctgaggtgggcagatcacctgaggtcaggagttcaagaccaacctgaccaacatggagaaaccccatctctactaaaaatacaaaattagccaggtgtggtggtgcatgcctgtaattccagctactcgggaggctgaggcaggagaattgcttgaacccaggaggcagaggttgcagtgggccaagatggcgccattgcactccagcctgggaacaagagcgaaactctgactaaaaaagaaagaaagaaagaaaaaaattagttgggcacggtggcaggcgcctgtaatcccaggtactcaggaggctgaggcaggagaattgcttgaacccgggaggcagaggtcgcagtgagccgagattgcaccactgccctccagcctgggtgacagagcaagactccgtctcaaaaaaaaaaaaaaaaaaaattggatacattgtaatacctcaaatacttgtaagtgaagcaccccagttcccatagagctgccgcactcagaggcttctgtaacctgcctgctcccagcattctatttagggtctggtatgtccagaatttgcagacacagcaattcctgcagcagcagtgcaccatgtggaaggggccccatgaccagcccactgtgagctcacacgtgatgactgaggcttcttcacacagcagggctctgggtgtgatacccagggcacacgcgtttgcacaggcacaggccacacaagttctcacatgctcagccccataagccgtgctggacaggcatggccatttacacccaggatcctgctgagaacagcaaccaactcaccaccctcgcatcatgatccttgccacacaggggctctggtggctttggtggcctgggctgtggctctgctgccagccaccttgagtgaagatccgggttctctgggtgctactcagctgctatgtggggagctggcccctggggtgatgagggcccttcccaacccgccctcagcccttggacagccaggatcacccggggctgtctgcatacagacttctcaggggagttctcagcttggacccttatctccccagaatcctggaacctgctccttctgctctcgtgactgactgtgttctctatgcaacttccaataaaacctcttcatttgaaaggaaaaaagtctgcattatctgtttaggaagggagagagttcatattgcaatctttttttttttaataaaaataatctcagcctgggcaacatggtgagaccccatctctgtaaaacatttttaaaaaattagccgggtatggtggcgcacacttgtagtcccagctactcaggaggctgaagcgggaggatccattgaacctgagaagtcgaagctgcagtgagctgtgattgtgccactgtactccagcctggacaacagagtgagacgccgtctcaaataaataaatacat

SEQ ID NO: 770 - protein, 473 aa, Homo sapiens
MRLGSPGLLFLLFSSLRADTQEKEVRAMVGSDVELSCACPEGSRFDLNDVYVYWQTSESKTVVTYHIPQNSSLENVDSRYRNRALMSPAGMLRGDFSLRLFNVTPQDEQKFHCLVLSQSLGFQEVLSVEVTLHVAANFSVPVVSAPHSPSQDELTFTCTSINGYPRPNVYWINKTDNSLLDQALQNDTVFLNMRGLYDVVSVLRIARTPSVNIGCCIENVLLQQNLTVGSQTGNDIGERDKITENPVSTGEKNAATWSILAVLCLLVVVAVAIGWVCRDRCLQHSYAGAWAVSPETELTGEFAVGSSRFWGAQGRLGCQLSFRVSKNFQKAKVPCLEQLLFLETQRSPRWCAWHFLQPPLGMGWHPGVHFVTLRWDFPNMHRSRETSARPPRSPVPSPDQGVQGGSRHRRPAPMGCPEWVQAPAPSPRGVSRAGPGTGAQPLWGVRSGSGHRQLLSVAATPAALVCPSVPGAT

SEQ ID NO: 771 - DNA, 1393 bp, Homo sapiens
  CDS (2)..(1393)
caccagatctcttcgagctgatactcaggagaaggaagtcagagcgatggtaggcagcgacgtggagctcagctgcgcttgccctgaaggaagccgttttgatttaaatgatgtttacgtatattggcaaaccagtgagtcgaaaaccgtggtgacctaccacatcccacagaacagctccttggaaaacgtggacagccgctaccggaaccgagccctgatgtcaccggccggcatgctgcggggcgacttctccctgcgcttgttcaacgtcaccccccaggacgagcagaagtttcactgcctggtgttgagccaatccctgggattccaggaggttttgagcattgaggttacactgcatgtggcagcaaacttcagcgtgcccgtcgtcagcgccccccacagcccctcccaggatgagctcaccttcacgtgtacatccataaacggctaccccaggcccaacgtgtactggatcaataagacggacaacagcctgctggaccaggctctgcagaatgacaccgtcttcttgaacatgcggggcttgtatgacgtggtcagcgtgctgaggatcgcacggacccccagcgtgaacattggctgctgcatagagaacgtgcttctgcagcagaacctgactgtcggcagccagacaggaaatgacatcggagagagagacaagatcacagagaatccagtcagtaccggcgagaaaaacgcggccacgtggagcatcctggctgtcctgtgcctgcttgtggtcgtggcggtggccataggctgggtgtgcagggaccgatgcctccaacacagctatgcaggtgcctgggctgtgagtccggagacagagctcactggtgagtttgccgtgggaagcagcaggttctggggggcccaggggaggcttggctgccagctgtctttcagagtttcaaaaaactttcaaaaggcaaaagtcccttgccttgaacaactgttgttcctggagacgcagcgaagccctcgatggtgcgcatggcatttcctgcagcctccccttggcatgggatggcatcctggtgtgcactttgtcacactgcgatgggattttcccaacatgcacagaagcagagagacgagtgctagacccccgcgctccccagtgcccagccccaaccagggtgtccagggcgggtccaggcaccggcgcccagcccccatggggtgtccggagtgggtccaggcaccggcgcccagcccccgtggggtgtccagggcgggtccaggcaccggcgcccagcccctgtggggtgtccggagcgggtccgggcaccgccagcttctctctgtggcagccactcctgcagctctcgtttgcccctcagttccaggagcaacactcgagggc

SEQ ID NO: 772 - protein, 464 aa, Homo sapiens
TRSLRADTQEKEVRAMVGSDVELSCACPEGSRFDLNDVYVYWQTSESKTVVTYHIPQNSSLENVDSRYRNRALMSPAGMLRGDFSLRLFNVTPQDEQKFHCLVLSQSLGFQEVLSIEVTLHVAANFSVPVVSAPHSPSQDELTFTCTSINGYPRPNVYWINKTDNSLLDQALQNDTVFLNMRGLYDVVSVLRIARTPSVNIGCCIENVLLQQNLTVGSQTGNDIGERDKITENPVSTGEKNAATWSILAVLCLLVVVAVAIGWVCRDRCLQHSYAGAWAVSPETELTGEFAVGSSRFWGAQGRLGCQLSFRVSKNFQKAKVPCLEQLLFLETQRSPRWCAWHFLQPPLGMGWHPGVHFVTLRWDFPNMHRSRETSARPPRSPVPSPNQGVQGGSRHRRPAPMGCPEWVQAPAPSPRGVSRAGPGTGAQPLWGVRSGSGHRQLLSVAATPAALVCPSVPGATLEG

SEQ ID NO: 773 - DNA, 1393 bp, Homo sapiens
  CDS (2)..(1393)
caccagatctcttcgagctgatactcaggagaaggaagtcagagcgatggtaggcagcgacgtggagctcagctgcgcttgccctgaaggaagccgttttgatttaaatgatgtttacgtatattggcaaaccagtgagtcgaaaaccgtggtgacctaccacatcccacagaacagctccttggaaaacgtggacagccgctaccggaaccgagccctgatgtcaccggccggcatgctgcggggcgacttctccctgcgcttgttcaacgtcaccccccaggacgagcagaagtttcactgcctggtgttgagccaatccctgggattccaggaggttttgagcattgaggttacactgcatgtggcagcaaacttcagcgtgcccgtcgtcagcgccccccacagcccctcccaggatgagctcaccttcacgtgtacatccataaacggctaccccaggcccaacgtgtactggatcaataagacggacaacagcctgctggaccaggctctgcagaatgacaccgtcttcttgaacatgcggggcttgtatgacgtggtcagcgtgctgaggatcgcacggacccccagcgtgaacattggctgctgcatagagaacgtgcttctgcagcagaacctgactgtcggcagccagacaggaaatgacatcggagagagagacaagatcacagagaatccagtcagtaccggcgagaaaaacgcggccacgtggagcatcctggctgtcctgtgcctgcttgtggtcgtggcggtggccataggctgggtgtgcagggaccgatgcctccaacacagctatgcaggtgcctgggctgtgagtccggagacagagctcactggtgagtttgccgtgggaagcagcaggttctggggggcccaggggaggcttggctgccagctgtctttcagagtttcaaaaaactttcaaaaggcaaaagtcccttgccttgaacaactgttgttcctggagacgcagcgaagccctcgatggtgcgcatggcatttcctgcagcctccccttggcatgggatggcatcctggtgtgcactttgtcacactgcgatgggattttcccaacatgcacagaagcagagagacgagtgctagacccccgcgctccccagtgcccagccccgaccagggtgtccagggcgggtccaggcaccggcgcccagcccccatggggtgtccggagtgggtccaggcaccggcgcccagcccccgtggggtgtccagggcgggtccaggcaccggcgcccagcccctgtggggtgtccggagcgggtccgggcaccgccagcttctctctgtggcagccactcctgcagctctcgtttgcccctcagttccaggagcaacactcgagggc

SEQ ID NO: 774 - protein, 464 aa, Homo sapiens
TRSLRADTQEKEVRAMVGSDVELSCACPEGSRFDLNDVYVYWQTSESKTVVTYHIPQNSSLENVDSRYRNRALMSPAGMLRGDFSLRLFNVTPQDEQKFHCLVLSQSLGFQEVLSIEVTLHVAANFSVPVVSAPHSPSQDELTFTCTSINGYPRPNVYWINKTDNSLLDQALQNDTVFLNMRGLYDVVSVLRIARTPSVNIGCCIENVLLQQNLTVGSQTGNDIGERDKITENPVSTGEKNAATWSILAVLCLLVVVAVAIGWVCRDRCLQHSYAGAWAVSPETELTGEFAVGSSRFWGAQGRLGCQLSFRVSKNFQKAKVPCLEQLLFLETQRSPRWCAWHFLQPPLGMGWHPGVHFVTLRWDFPNMHRSRETSARPPRSPVPSPDQGVQGGSRHRRPAPMGCPEWVQAPAPSPRGVSRAGPGTGAQPLWGVRSGSGHRQLLSVAATPAALVCPSVPGATLEG

SEQ ID NO: 775 - DNA, 871 bp, Homo sapiens
  CDS (2)..(871)
caccggatccgatactcaggagaaggaagtcagagcgatggtaggcagcgacgtggagctcagctgcgcttgccctgaaggaagccgttttgatttaaatgatgtttacgtatattggcaaaccagtgagtcgaaaaccgtggtgacctaccacatcccacagaacagctccttggaaaacgtggacagccgctaccggaaccgagccctgatgtcaccggccggcatgctgcggggcgacttctccctgcgcttgttcaacgtcaccccccaggacgagcagaagtttcactgcctggtgttgagccaatccctgggattccaggaggttttgagcgttgaggttacactgcatgtggcggcaaacttcagcgtgcccgtcgtcagcgccccccacagcccctcccaggatgagctcaccttcacgtgtacatccataaacggctaccccaggcccaacgtgtactggatcaataagacggacaacagcctgctggaccaggctctgcagaatgacaccgtcttcttgaacatgcggggcttgtatgacgtggtcagcgtgctgaggatcgcacggacccccagcgtgaacattggctgctgcatagagaacgtgcttctgcagcagaacctgactgtcggcagccagacaggaaatgacatcggagagagagacaagatcacagagaatccagtcagtaccggcgagaaaaacgcggccacgtggagcatcctggctgtcctgtgcctgcttgtggtcgtggcggtggccataggctgggtgtgcagggaccgatgcctccaacacagctatgcaggtgcctgggctgtgagtccggagacagagctcactggtcacctgctcgagggc

SEQ ID NO: 776 - protein, 290 aa, Homo sapiens
TGSDTQEKEVRAMVGSDVELSCACPEGSRFDLNDVYVYWQTSESKTVVTYHIPQNSSLENVDSRYRNRALMSPAGMLRGDFSLRLFNVTPQDEQKFHCLVLSQSLGFQEVLSVEVTLHVAANFSVPVVSAPHSPSQDELTFTCTSINGYPRPNVYWINKTDNSLLDQALQNDTVFLNMRGLYDVVSVLRIARTPSVNIGCCIENVLLQQNLTVGSQTGNDIGERDKITENPVSTGEKNAATWSILAVLCLLVVVAVAIGWVCRDRCLQHSYAGAWAVSPETELTGHLLEG

SEQ ID NO: 777 - DNA, 928 bp, Homo sapiens
  CDS (2)..(928)
caccggatccaccatgcggctgggcagtcctggactgctcttcctgctcttcagcagccttcgagctgatactcaggagaaggaagtcagagcgatggtaggcagcgacgtggagctcagctgcgcttgccctgaaggaagccgttttgatttaaatgatgtttacgtatattggcaaaccagtgagtcgaaaaccgtggtgacctaccacatcccacagaacagctccttggaaaacgtggacagccgctaccggaaccgagccctgatgtcaccggccggcatgctgcggggcgacttctccctgcgcttgttcaacgtcaccccccaggacgagcagaagtttcactgcctggtgttgagccaatccctgggattccaggaggttttgagcgttgaggttacactgcatgtggcggcaaacttcagcgtgcccgtcgtcagcgccccccacagcccctcccaggatgagctcaccttcacgtgtacatccataaacggctaccccaggcccaacgtgtaccggatcaataagacggacaacagcctgctggaccaggctctgcagaatgacaccgtcttcttgaacatgcggggcttgtatgacgtggtcagcgtgctgaggatcgcacggacccccagcgtgaacattggctgctgcatagagaacgtgcttctgcagcagaacctgactgtcggcagccagacaggaaatgacatcggagagagagacaagatcacagagaatccagtcagtaccggcgagaaaaacgcggccacgtggagcatcctggctgtcctgtgcctgcttgtggtcgtggcggtggccataggctgggtgtgcagggaccgatgcctccaacacagctatgcaggtgcctgggctgtgagtccggagacagagctcactggtcacctgctcgagggc

SEQ ID NO: 778 - protein, 309 aa, Homo sapiens
TGSTMRLGSPGLLFLLFSSLRADTQEKEVRAMVGSDVELSCACPEGSRFDLNDVYVYWQTSESKTVVTYHIPQNSSLENVDSRYRNRALMSPAGMLRGDFSLRLFNVTPQDEQKFHCLVLSQSLGFQEVLSVEVTLHVAANFSVPVVSAPHSPSQDELTFTCTSINGYPRPNVYRINKTDNSLLDQALQNDTVFLNMRGLYDVVSVLRIARTPSVNIGCCIENVLLQQNLTVGSQTGNDIGERDKITENPVSTGEKNAATWSILAVLCLLVVVAVAIGWVCRDRCLQHSYAGAWAVSPETELTGHLLEG

SEQ ID NO: 779 - DNA, 912 bp, Homo sapiens
  CDS (4)..(909)
accatgcggctgggcagtcctggactgctcttcctgctcttcagcagccttcgagctgatactcaggagaaggaagtcagagcgatggtaggcagcgacgtggagctcagctgcgcttgccctgaaggaagccgttttgatttaaatgatgtttacgtatattggcaaaccagtgagtcgaaaaccgtggtgacctaccacatcccacagaacagctccttggaaaacgtggacagccgctaccggaaccgagccctgatgtcaccggccggcatgctgcggggcgacttctccctgcgcttgttcaacgtcaccccccaggacgagcagaagtttcactgcctggtgttgagccaatccctgggattccaggaggttttgagcgttgaggttacactgcatgtggcagcaaacttcagcgtgcccgtcgtcagcgccccccacagcccctcccaggatgagctcaccttcacgtgtacatccataaacggctaccccaggcccaacgtgtactggatcaataagacggacaacagcctgctggaccaggctctgcagaatgacaccgtcttcttgaacatgcggggcttgtatgacgtggtcagcgtgctgaggatcgcacggacccccagcgtgaacattggctgctgcatagagaacgtgcttctgcagcagaacctgactgtcggcagccagacaggaaatgacatcggagagagagacaagatcacagagaatccagtcagtaccggcgagaaaaacgcggccacgtggagcatcctggctgtcctgtgcctgcttgtggtcgtggcggtggccataggctgggtgtgcagggaccgatgcctccaacacagctatgcaggtgcctgggctgtgagtccggagacagagctcactggtcacctgtaa

SEQ ID NO: 780 - protein, 302 aa, Homo sapiens
MRLGSPGLLFLLFSSLRADTQEKEVRAMVGSDVELSCACPEGSRFDLNDVYVYWQTSESKTVVTYHIPQNSSLENVDSRYRNRALMSPAGMLRGDFSLRLFNVTPQDEQKFHCLVLSQSLGFQEVLSVEVTLHVAANFSVPVVSAPHSPSQDELTFTCTSINGYPRPNVYWINKTDNSLLDQALQNDTVFLNMRGLYDVVSVLRIARTPSVNIGCCIENVLLQQNLTVGSQTGNDIGERDKITENPVSTGEKNAATWSILAVLCLLVVVAVAIGWVCRDRCLQHSYAGAWAVSPETELTGHL

SEQ ID NO: 781 - DNA, 910 bp, Homo sapiens
  CDS (2)..(907)
catgcggctgggcagtcctggactgctcttcctgctcttcagcagccttcgagctgatactcaggagaaggaagtcagagcgatggtaggcagcgacgtggagctcagctgcgcttgccctgaaggaagccgttttgatttaaatgatgtttacgtatattggcaaaccagtgagtcgaaaaccgtggtgacctaccatatcccacagaacagctccttggaaaacgtggacagccgctaccggaaccgagccctgatgtcaccggccggcatgctgcggggcgacttctccctgcgcttgttcaacgtcaccccccaggacgagcagaagtttcactgcctggtgttgagccaatccctgggattccaggaggttttgagcgttgaggttacactgcatgtggcagcaaacttcagcgtgcccgtcgtcagcgccccccacagcccctcccaggatgagctcaccttcacgtgtacatccataaacggctaccccaggcccaacgtgtactggatcaataagacggacaacagcctgctggaccaggctctgcagaatgacaccgtcttcttgaacatgcggggcttgtatgacgtggtcagcgtgctgaggatcgcacggacccccagcgtgaacattggctgctgcatagagaacgtgcttctgcagcagaacctgactgtcggcagccagacaggaaatgacatcggagagagagacaagatcacagagaatccagtcagtaccggcgagaaaaacgcggccacgtggagcatcctggctgtcctgtgcctgcttgtggtcgtggcggtggccataggctgggtgtgcagggaccgatgcctccaacacagctatgcaggtgcctgggctgtgagtccggagacagagctcactggtcacctgtaa

SEQ ID NO: 782 - protein, 302 aa, Homo sapiens; identical to SEQ ID NO: 780

SEQ ID NO: 783 - DNA, 705 bp, Homo sapiens
  CDS (1)..(705)
gatactcaggagaaggaagtcagagcgatggtaggcagcgacgtggagctcagctgcgcttgccctgaaggaagccgttttgatttaaatgatgtttacgtatattggcaaaccagtgagtcgaaaaccgtggtgacctaccacatcccacagaacagctccttggaaaacgtggacagccgctaccggaaccgagccctgatgtcaccggccggcatgctgcggggcgacttctccctgcgcttgttcaacgtcaccccccaggacgagcagaagtttcactgcctggtgttgagccaatccctgggattccaggaggttttgagcgttgaggttacactgcatgtggcagcaaacttcagcgtgcccgtcgtcagcgccccccacagcccctcccaggatgagctcaccttcacgtgtacatccataaacggctaccccaggcccaacgtgtactggatcaataagacggacaacagcctgctggaccaggctctgcagaatgacaccgtcttcttgaacatgcggggcttgtatgacgtggtcagcgtgctgaggatcgcacggacccccagcgtgaacattggctgctgcatagagaacgtgcttctgcagcagaacctgactgtcggcagccagacaggaaatgacatcggagagagagacaagatcacagagaatccagtcagtaccggcgagaaaaac

SEQ ID NO: 784 - protein, 235 aa, Homo sapiens
DTQEKEVRAMVGSDVELSCACPEGSRFDLNDVYVYWQTSESKTVVTYHIPQNSSLENVDSRYRNRALMSPAGMLRGDFSLRLFNVTPQDEQKFHCLVLSQSLGFQEVLSVEVTLHVAANFSVPVVSAPHSPSQDELTFTCTSINGYPRPNVYWINKTDNSLLDQALQNDTVFLNMRGLYDVVSVLRIARTPSVNIGCCIENVLLQQNLTVGSQTGNDIGERDKITENPVSTGEKN

SEQ ID NO: 785 - DNA, 1393 bp, Homo sapiens; identical to SEQ ID NO: 771
  CDS (11)..(1384)

SEQ ID NO: 786 - protein, 458 aa, Homo sapiens
LRADTQEKEVRAMVGSDVELSCACPEGSRFDLNDVYVYWQTSESKTVVTYHIPQNSSLENVDSRYRNRALMSPAGMLRGDFSLRLFNVTPQDEQKFHCLVLSQSLGFQEVLSIEVTLHVAANFSVPVVSAPHSPSQDELTFTCTSINGYPRPNVYWINKTDNSLLDQALQNDTVFLNMRGLYDVVSVLRIARTPSVNIGCCIENVLLQQNLTVGSQTGNDIGERDKITENPVSTGEKNAATWSILAVLCLLVVVAVAIGWVCRDRCLQHSYAGAWAVSPETELTGEFAVGSSRFWGAQGRLGCQLSFRVSKNFQKAKVPCLEQLLFLETQRSPRWCAWHFLQPPLGMGWHPGVHFVTLRWDFPNMHRSRETSARPPRSPVPSPNQGVQGGSRHRRPAPMGCPEWVQAPAPSPRGVSRAGPGTGAQPLWGVRSGSGHRQLLSVAATPAALVCPSVPGAT

SEQ ID NO: 787 - DNA, 928 bp, Homo sapiens
  CDS (14)..(919)
caccggatccaccatgcggctgggcagtcctggactgctcttcctgctcttcagcagccttcgagctgatactcaggagaaggaagtcagagcgatggtaggcagcgacgtggagctcagctgcgcttgccctgaaggaagccgttttgatttaaatgatgtttacgtatattggcaaaccagtgagtcgaaaaccgtggtgacctaccacatcccacagaacagctccttggaaaacgtggacagccgctaccggaaccgagccctgatgtcaccggccggcatgctgcggggcgacttctccctgcgcttgttcaacgtcaccccccaggacgagcagaagtttcactgcctggtgttgagccaatccctgggattccaggaggttttgagcattgaggttacactgcatgtggcggcaaacttcagcgtgcccgtcgtcagcgccccccacagcccctcccaggatgagctcaccttcacgtgtacatccataaacggctaccccaggcccaacgtgtactggatcaataagacggacaacagcctgctggaccaggctctgcagaatgacaccgtcttcttgaacatgcggggcttgtatgacgtggtcagcgtgctgaggatcgcacggacccccagcgtgaacattggctgctgcatagagaacgtgcttctgcagcagaacctgactgtcggcagccagacaggaaatgacatcggagagagagacaagatcacagagaatccagtcagtaccggcgagaaaaacgcggccacgtggagcatcctggctgtcctgtgcctgcttgtggtcgtggcggtggccataggctgggtgtgcagggaccgatgcctccaacacagctatgcaggtgcctgggctgtgagtccggagacagagctcactggtcacctgctcgagggc

SEQ ID NO: 788 - protein, 302 aa, Homo sapiens
MRLGSPGLLFLLFSSLRADTQEKEVRAMVGSDVELSCACPEGSRFDLNDVYVYWQTSESKTVVTYHIPQNSSLENVDSRYRNRALMSPAGMLRGDFSLRLFNVTPQDEQKFHCLVLSQSLGFQEVLSIEVTLHVAANFSVPVVSAPHSPSQDELTFTCTSINGYPRPNVYWINKTDNSLLDQALQNDTVFLNMRGLYDVVSVLRIARTPSVNIGCCIENVLLQQNLTVGSQTGNDIGERDKITENPVSTGEKNAATWSILAVLCLLVVVAVAIGWVCRDRCLQHSYAGAWAVSPETELTGHL

SEQ ID NO: 789 - DNA, 871 bp, Homo sapiens; identical to SEQ ID NO: 775
  CDS (11)..(862)

SEQ ID NO: 790 - protein, 284 aa, Homo sapiens
DTQEKEVRAMVGSDVELSCACPEGSRFDLNDVYVYWQTSESKTVVTYHIPQNSSLENVDSRYRNRALMSPAGMLRGDFSLRLFNVTPQDEQKFHCLVLSQSLGFQEVLSVEVTLHVAANFSVPVVSAPHSPSQDELTFTCTSINGYPRPNVYWINKTDNSLLDQALQNDTVFLNMRGLYDVVSVLRIARTPSVNIGCCIENVLLQQNLTVGSQTGNDIGERDKITENPVSTGEKNAATWSILAVLCLLVVVAVAIGWVCRDRCLQHSYAGAWAVSPETELTGHL

SEQ ID NO: 791 - DNA, 912 bp, Homo sapiens
  CDS (4)..(909)
accatgcggctgggcagtcctggactgctcttcctgctcttcagcagccttcgagctgatactcaggagaaggaagtcagagcgatggtaggcagcgacgtggagctcagctgcgcttgccctgaaggaagccgttttgatttaaatgatgtttacgtatattggcaaaccagtgagtcgaaaaccgtggtgacctaccacatcccacagaacagctccttggaaaacgtggacagccgctaccggaaccgagccctgatgtcaccggccggcatgctgcggggcgacttctccccgcgcttgttcaacgtcaccccccaggacgagcagaagtttcactgcctggtgttgagccaatccctgggattccaggaggttttgagcgttgaggttacactgcatgtggcagcaaacttcagcgtgcccgtcgtcagcgccccccacagcccctcccaggatgagctcaccttcacgtgtacatccataaacggctaccccaggcccaacgtgtactggatcaataagacggacaacagcctgctggaccaggctctgcagaatgacaccgtcttcttgaacatgcggggcttgtatgacgtggtcagcgtgctgaggatcgcacggacccccagcgtgaacattggctgctgcatagagaacgtgcttctgcagcagaacctgactgtcggcagccagacaggaaatgacatcggagagagagacaagatcacagagaatccagtcagtaccggcgagaaaaacgcggccacgtggagcatcctggctgtcctgtgcctgcttgtggtcgtggcggtggccataggctgggtgtgcagggaccgatgcctccaacacagctatgcaggtgcctgggctgtgagtccggagacagagctcactggtcacctgtaa

SEQ ID NO: 792 - protein, 302 aa, Homo sapiens
MRLGSPGLLFLLFSSLRADTQEKEVRAMVGSDVELSCACPEGSRFDLNDVYVYWQTSESKTVVTYHIPQNSSLENVDSRYRNRALMSPAGMLRGDFSPRLFNVTPQDEQKFHCLVLSQSLGFQEVLSVEVTLHVAANFSVPVVSAPHSPSQDELTFTCTSINGYPRPNVYWINKTDNSLLDQALQNDTVFLNMRGLYDVVSVLRIARTPSVNIGCCIENVLLQQNLTVGSQTGNDIGERDKITENPVSTGEKNAATWSILAVLCLLVVVAVAIGWVCRDRCLQHSYAGAWAVSPETELTGHL

SEQ ID NO: 793 - DNA, 4119 bp, Homo sapiens
  CDS (1)..(4116)
atgtctgctccagacgaagggagacgggatccccccaaaccgaagggcaagaccctgggcagcttctttgggtccctgcctggcttcagctctgcccggaacctggtggccaacgcacatagctcggcgagagcccggccggccgctgaccccacaggagcgcctgctgccgaggctgcccaaccacaggctcaggtggctgcccacccagagcagacggccccatggacggagaaggagctgcaaccttcggaaaagcagatggtgtccggggccaaagacctggtgtgttccaagatgtccagggccaaggatgccgtgtcctccggggtggccagcgtggtggacgtggctaagggagtggtccagggaggcctggacaccactcggtctgcacttacgggcaccaaggaggtggtgtccagcggggtcacaggggccatggacatggctaagggggccgtccaagggggtctggacacctcgaaggctgtcctcaccggcaccaaggacacggtgtccactgggctcacgggggcagtgaatgtggccaaagggaccgtacaggccggtgtggacaccaccaagactgtgctgaccggcaccaaagacacagtgactactggggtcatgggggcagtgaacttggccaaagggactgtccagactggcgtggaaacctccaaggctgtgctgaccggcaccaaagatgctgtgtccactgggctcacaggggcagtgaatgtggccagaggaagcattcagaccggtgtggacaccagtaagactgtcctaacaggtaccaaggacaccgtctgtagtggggtgactggtgccatgaatgtggccaaaggaaccatccagaccggcgtggacaccagtaagactgtcctaacaggtaccaaggacaccgtctgtagtggggtgactggtgccatgaatgtggccaaaggaaccatccagaccggcgtggacaccagtaagactgtcctaacaggtaccaaggacaccgtctgtagtggggtgactggtgccatgaatgtggccaaaggaaccatccagaccggcgtggacaccaccaagactgtcctaactggcaccaagaacactgtctgcagtggggtgaccggtgccgtgaacttggccaaagaggccatccaggggggcctggataccaccaagtctatggtcatgggtacgaaagacacgatgtccactgggctcacaggggcagcgaatgtggccaagggggccatgcaaactgggctgaacacaacccaaaatatcgcaacaggtacaaaggacaccgtctgcagtggggtgactggtgccatgaatttggccagaggaaccatccagacaggcgtggacaccaccaagatcgttctaactggtaccaaggacactgtctgcagtggggtcaccggtgctgcgaatgtggccaaaggggccgtccagggcggcctggacactacaaagtctgtcctgactggcactaaagatgctgtgtccactgggctcacaggggctgtgaacgtggccaaagggaccgtccagaccggcgtagacaccaccaagactgtcctaaccggcaccaaggacaccgtctgcagtggggtgaccagtgctgtgaacgtggccaaaggggccgtccaggggggcctggacaccaccaagtctgtggtcataggtacaaaagacacgatgtccactgggctcacgggggcagcgaatgtggccaagggggctgtccagacaggtgtagacacagccaagaccgtgctgaccggcaccaaggacacagtgactactgggctcgtgggggcagtgaatgtcgccaaagggaccgtccagacaggcatggacaccaccaaaactgtcctaaccggtaccaaggacaccatctacagtggggtcaccagtgccgtgaacgtggccaagggggctgtgcaaactgggctgaaaacgacccaaaatatcgcgacaggtacaaagaacacctttggcagtggggtgaccagtgctgtgaatgtggccaaaggggctgcccagacaggtgtagacacggccaagaccgtgctgaccggcaccaaggacacagtcactactgggctcatgggggcagtgaatgtcgccaaagggactgtccagaccagtgtggacaccaccaagactgtcctaactggtaccaaggacaccgtctgcagtggggtgaccggtgctgcgaatgtggccaaaggggccatccaagggggcctggacactacaaagtctgtcctgactggcactaaagatgctgtgtccactgggctcacaggggctgtgaagttggccaaagggactgtccagaccggcatggacaccaccaagactgtgttaactggtaccaaggatgctgtgtgcagtggggtgaccggtgctgcgaatgtggccaagggggccgtccagatgggtgtagacacggccaagaccgtgctgaccggtaccaaggacactgtctgcagtggggtcaccggtgctgcgaacgtggccaagggtgctgtgcaaactgggctgaaaacgacccaaaatatcgcaacaggtacaaagaacacccttggcagtggggtgaccggtgctgcgaaagtggccaaaggggccgtccaggggggcctggacactacaaagtctgtcctgactggcactaaagatgccgtgtccactgggctcacaggggctgtgaacttggccaaagggactgtccagaccggcgtggacaccagcaagactgtcctgaccggtaccaaggacaccgtctgcagtggagtcactggtgccgtaaatgtggccaaagggaccgtccagacaggtgtggacacagccaagacggtgctgagtggcgctaaggatgcagtgactactggagtcacgggggcagtgaatgtggccaaaggaaccgtgcagaccggcgtggacgcctccaaggctgtgcttatgggtaccaaggacactgtcttcagtggggttaccggtgccatgagcatggccaaaggggccgtccaggggggcctggacaccaccaagacagtgctgaccggaaccaaagacgcagtgtccgctgggctcatggggtcagggaacgtggcgacaggggccacccacactggcctcagcaccttccagaactggttacctagtacccccgccacctcctggggtggactcaccagttccaggaccacagacaatggtggggagcagactgccctgagcccccaagaggccccgttctctggcatctccacgcccccggatgtgctcagtgtaggcccggagcctgcctgggaagccgcagccactaccaagggccttgcgactgacgtggcgacgttcacccaaggggccgccccaggcagggaggacacggggcttttggccaccacacacggccccgaagaagccccacgcttggcaatgctgcagaatgagttggaggggctgggggacatcttccaccccatgaatgcggaggagcaagctcagctggctgcctcccagcctgggccaaaggtgctgtcggcggaacaggggagctacttcgttcgtttaggtgacctgggtcccagcttccgccagcgggcatttgaacacgcggtgagccacctgcagcacggccagttccaagccagggacactctggcccagctccaggactgcttcaggctgattgaaaaggcccagcaggctccagaagggcagccacgtctggaccagggctcaggtgccagtgcggaggacgctgctgtccaggaggagcgggatgccggggttctgtccagggtctgcggccttctccggcagctgcacacggcctacagtggcctggtctccagcctccagggcctgcccgccgagctccagcagccagtggggcgggcgcggcacagcctctgtgagctctatggcatcgtggcctcagctggctctgtagaggagctgcccgcagagcggctggtgcagagccgcgagggtgtgcaccaggcttggcaggggttagagcagctgctggagggcctacagcacaatcccccgctcagctggctggtagggcccttcgccttgcccgctggcgggcagtag

SEQ ID NO: 794 - protein, 1372 aa, Homo sapiens
MSAPDEGRRDPPKPKGKTLGSFFGSLPGFSSARNLVANAHSSARARPAADPTGAPAAEAAQPQAQVAAHPEQTAPWTEKELQPSEKQMVSGAKDLVCSKMSRAKDAVSSGVASVVDVAKGVVQGGLDTTRSALTGTKEVVSSGVTGAMDMAKGAVQGGLDTSKAVLTGTKDTVSTGLTGAVNVAKGTVQAGVDTTKTVLTGTKDTVTTGVMGAVNLAKGTVQTGVETSKAVLTGTKDAVSTGLTGAVNVARGSIQTGVDTSKTVLTGTKDTVCSGVTGAMNVAKGTIQTGVDTSKTVLTGTKDTVCSGVTGAMNVAKGTIQTGVDTSKTVLTGTKDTVCSGVTGAMNVAKGTIQTGVDTTKTVLTGTKNTVCSGVTGAVNLAKEAIQGGLDTTKSMVMGTKDTMSTGLTGAANVAKGAMQTGLNTTQNIATGTKDTVCSGVTGAMNLARGTIQTGVDTTKIVLTGTKDTVCSGVTGAANVAKGAVQGGLDTTKSVLTGTKDAVSTGLTGAVNVAKGTVQTGVDTTKTVLTGTKDTVCSGVTSAVNVAKGAVQGGLDTTKSVVIGTKDTMSTGLTGAANVAKGAVQTGVDTAKTVLTGTKDTVTTGLVGAVNVAKGTVQTGMDTTKTVLTGTKDTIYSGVTSAVNVAKGAVQTGLKTTQNIATGTKNTFGSGVTSAVNVAKGAAQTGVDTAKTVLTGTKDTVTTGLMGAVNVAKGTVQTSVDTTKTVLTGTKDTVCSGVTGAANVAKGAIQGGLDTTKSVLTGTKDAVSTGLTGAVKLAKGTVQTGMDTTKTVLTGTKDAVCSGVTGAANVAKGAVQMGVDTAKTVLTGTKDTVCSGVTGAANVAKGAVQTGLKTTQNIATGTKNTLGSGVTGAAKVAKGAVQGGLDTTKSVLTGTKDAVSTGLTGAVNLAKGTVQTGVDTSKTVLTGTKDTVCSGVTGAVNVAKGTVQTGVDTAKTVLSGAKDAVTTGVTGAVNVAKGTVQTGVDASKAVLMGTKDTVFSGVTGAMSMAKGAVQGGLDTTKTVLTGTKDAVSAGLMGSGNVATGATHTGLSTFQNWLPSTPATSWGGLTSSRTTDNGGEQTALSPQEAPFSGISTPPDVLSVGPEPAWEAAATTKGLATDVATFTQGAAPGREDTGLLATTHGPEEAPRLAMLQNELEGLGDIFHPMNAEEQAQLAASQPGPKVLSAEQGSYFVRLGDLGPSFRQRAFEHAVSHLQHGQFQARDTLAQLQDCFRLIEKAQQAPEGQPRLDQGSGASAEDAAVQEERDAGVLSRVCGLLRQLHTAYSGLVSSLQGLPAELQQPVGRARHSLCELYGIVASAGSVEELPAERLVQSREGVHQAWQGLEQLLEGLQHNPPLSWLVGPFALPAGGQ

SEQ ID NO: 795 - DNA, 6600 bp, Homo sapiens
  CDS (23)..(4336)
tccagcttctcacgttctcactatgtctgctccagacgaagggagacgggatccccccaaaccgaagggcaagaccctgggcagcttctttgggtccctgcctggcttcaactctgcccggaacctggtggccaacgcacatagctcggcgagagcccggccggccgctgaccccacaggagcgcctgctgccgaggctgcccaaccacaggctcaggtggctgcccacccagagcagacggccccatggacggagaaggagctgcaaccttcggaaaagcagatggtgtccggggccaaagacctggtgtgttccaagatgtccagggccaaggatgccgtgtcctccggggtggccagcgtggtggacgtggctaagggagtggtccagggaggcctggacaccactcggtctgcacttacgggcaccaaggaggcggtgtccagcggggtcacaggggccatggacatggctaagggggccgtccaagggggtctggacacctcgaaggctgtcctcaccggcaccaaggacacggtgtccactgggctcacgggggcagtgaatgtggccaaagggaccgtacaggccggtgtggacaccaccaagactgtgctgaccggcaccaaagacacagtgactactggggtcatgggggcagtgaacttggccaaagggactgtccagactggcgtggaaacctccaaggctgtgctgaccggcaccaaagatgctgtgtccactgggctcacaggggcagtgaatgtggccagaggaagcattcagaccggtgtggacaccagtaagactgtcctaacaggtaccaaggacaccgtctgtagtggggtgaccagtgccatgaatgtggccaaaggaaccatccagaccggcgtggacaccagtaagactgtcctaacaggtaccaaggacaccgtctgtagtggggtgactggtgccatgaatgtggccaaaggaaccatccagaccggcgtggacaccagtaagactgtcctaacaggtaccaaggacaccgtctgtagtggggtgactggtgccatgaatgtggccaaaggaaccatccagaccggcgtggacaccaccaagactgtcctaactggcaccaagaacactgtctgcagtggggtgaccggtgccgtgaacttggccaaagaggccatccaggggggcctggataccaccaagtctatggtcatgggtacgaaagacacgatgtccactgggctcacgggggcagcgaatgtggccaagggggccatgcaaactgggctgaacacaacccaaaatatcgcaacaggtacaaaggacaccgtctgcagtggggtgactggtgccatgaatttggccagaggaaccatccagacaggcgtggacaccaccaagatcgttctaactggtaccaaggacactgtctgcagtggggtcaccggtgctgcgaatgtggccaaaggggccgtccaggggggcctggacactacaaagtctgtcctgactggcactaaagatgctgtgtccactgggctcacaggggctgtgaacgtggccaaagggaccgtccagaccggcgtagacaccaccaagactgtcctaaccggcaccaaggacaccgtctgcagtggggtgaccagtgctgtgaacgtggccaaaggggccgtccaggggggcctggacaccaccaagtctgtggtcataggtacaaaagacacgatgtccactgggctcacgggggcagcgaatgtggccaagggggctgtccagacaggtgtagacacagccaagaccgtgctgaccggcaccaaggacacagtgactactgggctcgtgggggcagtgaatgtcgccaaagggaccgtccagacaggcatggacaccaccaaaactgtcctaaccggtaccaaggacaccatctacagtggggtcaccagtgccgtgaacgtggccaagggggctgtgcaaactgggctgaaaacgacccaaaatatcgcgacaggtacaaagaacacctttggcagtggggtgaccggtgctgtgaatgtggccaaaggggccgtccagacaggtgtagacacagccaagaccgtgctgaccggcaccaaggacacagtcactactgggctcatgggggcagtgaatgtcgccaaagggactgtccagaccagtgtggacaccaccaagactgtcctaactggtaccaaggacaccgtctgcagtggggtgaccggtgctgcgaatgtggccaagggggccgtccagacgggtgtagacacggccaagaccgtgctgaccggtaccaaggacactgtctgcagtggggtcaccggtgctgtgaacgtggccaagggtgctgtgcaaactgggctgaaaacgacccaaaatatcgcaacaggtacaaagaacacccttggcagtggggtgaccggtgctgcgaatgtggccaaaggggccgtccaggggggcctggacactacaaagtctgtcctgactggcactaaagatgctgtgtccactgggctcacaggggctgtgaacttggccaaagggactgtccagaccggcatggacaccaccaagactgtgttaactggtaccaaggatgctgtgtgcagtggggtgaccggtgctgcgaatgtggccaagggggccgtccagacgggtgtagacacggccaagaccgtgctgaccggcaccaaggacacagtcactactgggctcatgggggcagtgaatgtcgccaaagggaccgtccagaccagtgtggacaccaccaagactgtcctaactggtaccaaggacaccgtctgcagtggggtgaccggtgctgcgaatgtggccaagggggccgtccaggggggcctggacactacaaagtctgtcctgactggcactaaagacaccgtatccactgggctcacaggggctgtgaacttggccaaagggactgtccagaccggcgtggacaccagcaagactgtcctgaccggtaccaaggacaccgtctgcagtggagtcactggtgccgtaaatgtggccaaaggcaccgtccagacaggtgtggacacagccaagacggtgctgagtggcgctaaggatgcagtgactactggagtcacgggggcagtgaatgtggccaaaggaaccgtgcagaccggcgtggacgcctccaaggctgtgcttatgggtaccaaggacactgtcttcagtggggttaccggtgccatgagcatggccaaaggggccgtccaggggggcctggacaccaccaagacagtgctgaccggaaccaaagacgcagtgtccgctgggctcatggggtcagggaacgtggcgacaggggccacccacactggcctcagcaccttccagaactggttacctagtacccccgccacctcctggggtggactcaccagttccaggaccacagacaatggtggggagcagactgccctgagcccccaagaggccccgttctctggcatctccacgcccccggatgtgctcagtgtaggcccggagcctgcctgggaagccgcagccactaccaagggccttgcgactgacgtggcgacgttcacccaaggggccgccccaggcagggaggacacggggcttttgaccaccacacacggccccgaagaagccccacgcttggcaatgctgcagaatgagttggaggggctgggggacatcttccaccccatgaatgcggaggagcaagctcagctggctgcctcccagcccgggccaaaggtgctgtcggcggaacaggggagctacttcgttcgtttaggtgacctgggtcccagcttccgccagcgggcatttgaacacgcggtgagccacctgcagcacggccagttccaagccagggacactctggcccagctccaggactgcttcaggctgattgaaaaggcccagcaggctccagaagggcagccacgtctggaccagggctcaggtgccagtgcggaggacgctgctgtccaggaggagcgggatgccggggttctgtccagggtctgcggccttctccggcagctgcacacggcctacagtggcctggtctccagcctccagggcctgcccgccgagctccagcagccagtggggcgggcgcggcacagcctctgtgagctctatggcatcgtggcctcagctggctctgtagaggagctgcccgcagagcggctggtgcagagccgcgagggtgtgcaccaggcttggcaggggttagagcagctgctggagggcctacagcacaatcccccgctcagctggctggtagggcccttcgccttgcccgctggcgggcagtagctgtaggagcctgcaggcccggcgcggggtcgccctgctctgtccagggaggagctgcctcagaactttctccccgcccccaaacctggatcggttccctaaagccctagacctttggggctgcagctggctgagcgccgaggggctgcggaggcagtgaccttcttaactgagccaccccacgccctgctccgggcctgcctgcatctcccacctcctccccagcgctgcctgcccctctcggagcctggggtcactcagaccaccagccaagagccttcccttgaagtccccaagcaagcactgcaattaggaaagagaaaaagcagcgtgcccagcctggaagggcatctgtttgccccgctagcaacccttttatatctagcagggctcttccagtcctgcagcacgggcccccagctatcagcggtgcaggcagtgctgtggcatcccaggctccgggcagctccgttctcatgctgaaagtgggtctccggccttagcacacacaccttgagggtcttaagaaccacattccctcatagtagaaagtactagaaaaagcgacactgccatcatcatcccaaggcaggctgctactgcctttgctgacccccggggtggcctcacggtggggacaaagctgccaggagccacagcagccacagctggggctttgcaccagcctggcttgagactgagcagtttgcagggggtggggggtgcaaaaaacaagcaaacaggctgctgctgcctccagctgcccaccacaggcctgccccaggcacctggggctctgaggcccctggggaggctgggcccagcagctgcccctggagaacacagacaaaggacttccccgcagggaactgtgccctatggagggatcagacagggctgggaacagccacagaggctgcgtgcctatggcacagcccttcctccgccgcacactccccctgggtcctcaggcccacccaagcgccgggctgcagaggaagcggggctggggaggctgcaggcatcagagacactggtggtggcggacccggccgccgggccccgtgctctcaggctagcccaggtcgtggaggctggcaggctcaggtcgggtgtgagacgtgccgtggctgcgctcagtccagcggggaggagccgttcagcccggcctccccaggaagccatatccccactcacccggtaagagaaccttgtcgtcccctttccatgctctcctaggacacgagcccaggaaccccagacccagggggaggaagggtggaggggccccaggggtcaccatgtgcaccaggggccgtgaggggccggggcattcagctcagctctgaaccggggaagctggcacggcaaggactgcctcaggtgacgggccgtgagaggggacgggtcaggagccttcccaagccttctcctcagcccgacacccatggccatcggaggctaggatgccagacacagccatttgcagaaatcaggcacagtgactgcagctcacgtccagccaaccaagcatggggccgcagctcaggaagtcccttcccgccacaccacagcctaattcttactgggacggaggcaactcggctacgctgggcaggacgacaaacacgagacgccactgtggaatgagcaacttcggagcacggggtgacttgcttgggaccgtgcccacgtgacagccccttatgcagaggaggaaagagaagccccgagtgggaggggaacctgtccaaagtcacacggtgtgtgggtgacacagctggggtgagtcgaggctggcccctgaggcccatgctccctgaacgctggagaccactgtcggctagcagcggctctcagggaaggcctggtctccaccctcccagcctagcctcgcggaccctcgtcctccccacatcggacctgctcacctgcctggaccctgggctgccagatgcaggaagcatcaaaccccccagcctcgtgggtgcggggcagggcgcaggcagcacagcttagatgccctggtttgtccctcttgtctcctgggaagagcttgctcccgcccagctctcctgccactggcctttcagggttgggctgggcccagagtgccttttagtcgcttctcacggtggcctgatggctcaacccagtcccaaacgggcccagtgacactgccgactgcgccccagctcaggcccccactgcaccagcaatgctagaaaaccaagccaataaaagtgatttcttttttcatt

SEQ ID NO: 796 - protein, 1438 aa, Homo sapiens
MSAPDEGRRDPPKPKGKTLGSFFGSLPGFNSARNLVANAHSSARARPAADPTGAPAAEAAQPQAQVAAHPEQTAPWTEKELQPSEKQMVSGAKDLVCSKMSRAKDAVSSGVASVVDVAKGVVQGGLDTTRSALTGTKEAVSSGVTGAMDMAKGAVQGGLDTSKAVLTGTKDTVSTGLTGAVNVAKGTVQAGVDTTKTVLTGTKDTVTTGVMGAVNLAKGTVQTGVETSKAVLTGTKDAVSTGLTGAVNVARGSIQTGVDTSKTVLTGTKDTVCSGVTSAMNVAKGTIQTGVDTSKTVLTGTKDTVCSGVTGAMNVAKGTIQTGVDTSKTVLTGTKDTVCSGVTGAMNVAKGTIQTGVDTTKTVLTGTKNTVCSGVTGAVNLAKEAIQGGLDTTKSMVMGTKDTMSTGLTGAANVAKGAMQTGLNTTQNIATGTKDTVCSGVTGAMNLARGTIQTGVDTTKIVLTGTKDTVCSGVTGAANVAKGAVQGGLDTTKSVLTGTKDAVSTGLTGAVNVAKGTVQTGVDTTKTVLTGTKDTVCSGVTSAVNVAKGAVQGGLDTTKSVVIGTKDTMSTGLTGAANVAKGAVQTGVDTAKTVLTGTKDTVTTGLVGAVNVAKGTVQTGMDTTKTVLTGTKDTIYSGVTSAVNVAKGAVQTGLKTTQNIATGTKNTFGSGVTGAVNVAKGAVQTGVDTAKTVLTGTKDTVTTGLMGAVNVAKGTVQTSVDTTKTVLTGTKDTVCSGVTGAANVAKGAVQTGVDTAKTVLTGTKDTVCSGVTGAVNVAKGAVQTGLKTTQNIATGTKNTLGSGVTGAANVAKGAVQGGLDTTKSVLTGTKDAVSTGLTGAVNLAKGTVQTGMDTTKTVLTGTKDAVCSGVTGAANVAKGAVQTGVDTAKTVLTGTKDTVTTGLMGAVNVAKGTVQTSVDTTKTVLTGTKDTVCSGVTGAANVAKGAVQGGLDTTKSVLTGTKDTVSTGLTGAVNLAKGTVQTGVDTSKTVLTGTKDTVCSGVTGAVNVAKGTVQTGVDTAKTVLSGAKDAVTTGVTGAVNVAKGTVQTGVDASKAVLMGTKDTVFSGVTGAMSMAKGAVQGGLDTTKTVLTGTKDAVSAGLMGSGNVATGATHTGLSTFQNWLPSTPATSWGGLTSSRTTDNGGEQTALSPQEAPFSGISTPPDVLSVGPEPAWEAAATTKGLATDVATFTQGAAPGREDTGLLTTTHGPEEAPRLAMLQNELEGLGDIFHPMNAEEQAQLAASQPGPKVLSAEQGSYFVRLGDLGPSFRQRAFEHAVSHLQHGQFQARDTLAQLQDCFRLIEKAQQAPEGQPRLDQGSGASAEDAAVQEERDAGVLSRVCGLLRQLHTAYSGLVSSLQGLPAELQQPVGRARHSLCELYGIVASAGSVEELPAERLVQSREGVHQAWQGLEQLLEGLQHNPPLSWLVGPFALPAGGQ

SEQ ID NO: 797 - DNA, 3839 bp, Homo sapiens
  CDS (131)..(3805)
gtgaggccaggcctgcaggtgggtgtcgggctgctcaggctttcagtggggagtgggtgtgggatgggaggctagggaacccccattcacgcaccttctctgcccccttccagcttctcacgttctcactatgtctgctccagacgaagggagacgggatccccccaaaccgaagggcaagccccccgcccccatgcagaccctgggcagcttctttgggtccctgcctggcttcagctctgcccggaacctggtggccaacgcacatagctcggtcggggccaaagacctggtgtgttccaagatgtccagggccaaggatgccgtgtcctccggggtggccagcgtggtggacgtggctaagggagtggtccagggaggcctggacaccactcggtctgcacttacgggcaccaaggaggtggtgtccagcggggtcacaggggccatggacatggctaagggggccgtccaagggggtctggacacctcgaaggctgtcctcaccggcaccaaggacacggtgtccactgggctcacgggggcagtgaatgtggccaaagggaccgtacaggccggtgtggacaccaccaagactgtgctgaccggcaccaaagacacagtgactactggggtcatgggggcagtgaacttggccaaagggactgtccagactggcgtggaaacctccaaggctgtgctgaccggcaccaaagatgctgtgtccactgggctcacaggggcagtgaatgtggccagaggaagcattcagaccggtgtggacaccagtaagactgtcctaacaggtaccaaggacaccgtctgtagtggggtgactggtgccatgaatgtggccaaaggaaccatccagaccggcgtggacaccagtaagactgtcctaacaggtaccaaggacaccgtctgtagtggggtgactggtgccatgaatgtggccaaaggaaccatccagaccggcgtggacaccagtaagactgtcctaacaggtaccaaggacaccgtctgtagtggggtgactggtgccatgaatgtggccaaaggaaccatccagaccggcgtggacaccaccaagactgtcctaactggcaccaagaacactgtctgcagtggggtgaccggtgccgtgaacttggccaaagaggccatccaggggggcctggataccaccaagtctatggtcatgggtacgaaagacacgatgtccactgggctcacaggggcagcgaatgtggccaagggggccatgcaaactgggctgaacacaacccaaaatatcgcaacaggtacaaaggacaccgtctgcagtggggtgactggtgccatgaatttggccagaggaaccatccagacaggcgtggacaccaccaagatcgttctaactggtaccaaggacactgtctgcagtggggtcaccggtgctgcgaatgtggccaaaggggccgtccagggcggcctggacactacaaagtctgtcctgactggcactaaagatgctgtgtccactgggctcacaggggctgtgaacgtggccaaagggaccgtccagaccggcgtagacaccaccaagactgtcctaaccggcaccaaggacaccgtctgcagtggggtgaccagtgctgtgaacgtggccaaaggggccgtccaggggggcctggacaccaccaagtctgtggtcataggtacaaaagacacgatgtccactgggctcacgggggcagcgaatgtggccaagggggctgtccagacaggtgtagacacagccaagaccgtgctgaccggcaccaaggacacagtgactactgggctcgtgggggcagtgaatgtcgccaaagggaccgtccagacaggcatggacaccaccaaaactgtcctaaccggtaccaaggacaccatctacagtggggtcaccagtgccgtgaacgtggccaagggggctgtgcaaactgggctgaaaacgacccaaaatatcgcgacaggtacaaagaacacctttggcagtggggtgaccagtgctgtgaatgtggccaaaggggctgcccagacaggtgtagacacggccaagaccgtgctgaccggcaccaaggacacagtcactactgggctcatgggggcagtgaatgtcgccaaagggactgtccagaccagtgtggacaccaccaagactgtcctaactggtaccaaggacaccgtctgcagtggggtgaccggtgctgcgaatgtggccaaaggggccatccaagggggcctggacactacaaagtctgtcctgactggcactaaagatgctgtgtccactgggctcacaggggctgtgaagttggccaaagggactgtccagaccggcatggacaccaccaagactgtgttaactggtaccaaggatgctgtgtgcagtggggtgaccggtgctgcgaatgtggccaagggggccgtccagatgggtgtagacacggccaagaccgtgctgaccggtaccaaggacactgtctgcagtggggtcaccggtgctgcgaacgtggccaagggtgctgtgcaaactgggctgaaaacgacccaaaatatcgcaacaggtacaaagaacacccttggcagtggggtgaccggtgctgcgaaagtggccaaaggggccgtccaggggggcctggacactacaaagtctgtcctgactggcactaaagatgccgtgtccactgggctcacaggggctgtgaacttggccaaagggactgtccagaccggcgtggacaccagcaagactgtcctgaccggtaccaaggacaccgtctgcagtggagtcactggtgccgtaaatgtggccaaagggaccgtccagacaggtgtggacacagccaagacggtgctgagtggcgctaaggatgcagtgactactggagtcacgggggcagtgaatgtggccaaaggaaccgtgcagaccggcgtggacgcctccaaggctgtgcttatgggtaccaaggacactgtcttcagtggggttaccggtgccatgagcatggccaaaggggccgtccaggggggcctggacaccaccaagacagtgctgaccggaaccaaagacgcagtgtccgctgggctcatggggtcagggaacgtggcgacaggggccacccacactggcctcagcaccttccagaactggttacctagtacccccgccacctcctggggtggactcaccagttccaggaccacagctcagctggctgcctcccagcctgggccaaaggtgctgtcggcggaacaggggagctacttcgttcgtttaggtgacctgggtcccagcttccgccagcgggcatttgaacacgcggtgagccacctgcagcacggccagttccaagccagggacactctggcccagctccaggactgcttcaggctgattgaaaaggcccagcaggctccagaagggcagccacgtctggaccagggctcaggtgccagtgcggaggacgctgctgtccaggagagggtctgcggccttctccggcagctgcacacggcctacagtggcctggtctccagcctccagggcctgcccgccgagctccagcagccagtggggcgggcgcggcacagcctctgtgagctctatggcatcgtggcctcagctggctctgtagaggagctgcccgcagagcggctggtgcagagccgcgagggtgtgcaccaggcttggcaggggttagagcagctgctggagggcctacagcacaatcccccgctcagctggctggtagggcccttcgccttgcccgctggcgggcagtagctgtaggagcctgcaggcccggcgcggggtc

SEQ ID NO: 798 - protein, 1225 aa, Homo sapiens
MSAPDEGRRDPPKPKGKPPAPMQTLGSFFGSLPGFSSARNLVANAHSSVGAKDLVCSKMSRAKDAVSSGVASVVDVAKGVVQGGLDTTRSALTGTKEVVSSGVTGAMDMAKGAVQGGLDTSKAVLTGTKDTVSTGLTGAVNVAKGTVQAGVDTTKTVLTGTKDTVTTGVMGAVNLAKGTVQTGVETSKAVLTGTKDAVSTGLTGAVNVARGSIQTGVDTSKTVLTGTKDTVCSGVTGAMNVAKGTIQTGVDTSKTVLTGTKDTVCSGVTGAMNVAKGTIQTGVDTSKTVLTGTKDTVCSGVTGAMNVAKGTIQTGVDTTKTVLTGTKNTVCSGVTGAVNLAKEAIQGGLDTTKSMVMGTKDTMSTGLTGAANVAKGAMQTGLNTTQNIATGTKDTVCSGVTGAMNLARGTIQTGVDTTKIVLTGTKDTVCSGVTGAANVAKGAVQGGLDTTKSVLTGTKDAVSTGLTGAVNVAKGTVQTGVDTTKTVLTGTKDTVCSGVTSAVNVAKGAVQGGLDTTKSVVIGTKDTMSTGLTGAANVAKGAVQTGVDTAKTVLTGTKDTVTTGLVGAVNVAKGTVQTGMDTTKTVLTGTKDTIYSGVTSAVNVAKGAVQTGLKTTQNIATGTKNTFGSGVTSAVNVAKGAAQTGVDTAKTVLTGTKDTVTTGLMGAVNVAKGTVQTSVDTTKTVLTGTKDTVCSGVTGAANVAKGAIQGGLDTTKSVLTGTKDAVSTGLTGAVKLAKGTVQTGMDTTKTVLTGTKDAVCSGVTGAANVAKGAVQMGVDTAKTVLTGTKDTVCSGVTGAANVAKGAVQTGLKTTQNIATGTKNTLGSGVTGAAKVAKGAVQGGLDTTKSVLTGTKDAVSTGLTGAVNLAKGTVQTGVDTSKTVLTGTKDTVCSGVTGAVNVAKGTVQTGVDTAKTVLSGAKDAVTTGVTGAVNVAKGTVQTGVDASKAVLMGTKDTVFSGVTGAMSMAKGAVQGGLDTTKTVLTGTKDAVSAGLMGSGNVATGATHTGLSTFQNWLPSTPATSWGGLTSSRTTAQLAASQPGPKVLSAEQGSYFVRLGDLGPSFRQRAFEHAVSHLQHGQFQARDTLAQLQDCFRLIEKAQQAPEGQPRLDQGSGASAEDAAVQERVCGLLRQLHTAYSGLVSSLQGLPAELQQPVGRARHSLCELYGIVASAGSVEELPAERLVQSREGVHQAWQGLEQLLEGLQHNPPLSWLVGPFALPAGGQ

SEQ ID NO: 799 - DNA, 2247 bp, Homo sapiens
  CDS (1)..(2247)
agatctatcatgtctgctccagacgaagggagacgggatccccccaaaccgaagggcaagaccctgggcagcttctttgggtccctgcctggcttcagctctgcccggaacctggtggccaacgcacatagctcggcgagagcccggccggccgctgaccccacaggagcgcctgctgccgaggctgcccaaccacaggctcaggtggctgcccacccagagcagacggccccatggacggagaaggagctgcaaccttcggaaaagatggtgtccggggccaaagacctggtgtgttccaagatgtccagggccaaggatgccgtgtcctccggggtggccagcgtggtggacgtggctacgggagtggtccagggaggcctggacaccactcggtctgcacttacgggcaccaaggaggcggtgtccagcgggttcacaggggccatggacatggctaagggggccgtccaagggggtctggacacctcgaaggctgtcctcaccggcaccaaggacacggtgtccactgggctcacgggggcagtgaatgtggccaaagggaccgtacaggccggtgtggacaccaccaagactgtgctgaccggcaccaaagacacagtgactactggggtcatgggggcagtgaacttggccaaagggactgtccagactggcgtggaaacctccaaggctgtgctgaccggcaccaaagatgctgtgtccactgggctcacaggggcagtgaatgtggccagaggaagcattcagaccggtgtggacaccagtaagactgtcctaacaggtaccaaggacaccgtctgtagtggggtgaccagtgccatgaatgtggccaaaggaaccatccagaccggcgtggacaccagcaagactgtcctgaccggtaccaaggacaccgtctgcagtggagtcactggtgccgtaaatgtggccaaaggcaccgtccagacaggtgtggacacagccaagacggtgctgagtggcgctaaggatgcagtgactactggagtcacgggggcagtgaatgtggccaaaggaaccgtgcagaccggcgtggacgcctccaaggctgtgcttatgggtaccaaggacactgtcttcagtggggttaccggtgccatgagcatggccaaaggggccgtccaggggggcctggacaccaccaagacagtgctgaccggaaccaaagacgcagtgtccgctgggctcatggggtcagggaacgtggcgacaggggccacccacactggcctcagcaccttccagaactggttacctagtacccccgccacctcctggggtggactcaccagttccaggaccacagacaatggtggggagcagactgccctgagcccccaagaggccccgttctctggcatctccacgcccccggatgtgctcagtgtaggcccggagcctgcctgggaagccgcagccactaccaagggccttgcgactgacgtggcgacgttcacccaaggggccgccccaggcagggaggacacggggcttttgaccaccacacacggccccgaagaagccccacgcttggcaatgctgcagaatgagttggaggggctgggggacatcttccaccccatgaatgcggaggagcaagctcagctggctgcctcccagcccgggccaaaggtgctgtcggcggaacaggggagctacttcgttcgtttaggtgacctgggtcccagcttccgccagcgggcatttgaacacgcggtgagccacctgcagcacggccagttccaagccagggacactctggcccagctccaggactgcttcaggctgattgaaaaggcccagcaggctccagaagggcagccacgtctggaccagggctcaggtgccagtgcggaggacgctgctgtccaggaggagcgggatgccggggttctgtccagggtctgcggccttctccggcagctgcacacggcctacagtggcctggtctccagcctccagggcctgcccgccgagctccagcagccagtggggcgggcgcggcacagcctctgtgagctctatggcatcgtggcctcagctggctctgtagaggagctgcccgcagagcggctggtgcagagccgcgagggtgtgcaccaggcttggcaggggttagagcagctgctggagggcctacagcacaatcccccgctcagctggctggtagggcccttcgccttgcccgctggcgggcagctcgag

SEQ ID NO: 800 - protein, 749 aa, Homo sapiens
RSIMSAPDEGRRDPPKPKGKTLGSFFGSLPGFSSARNLVANAHSSARARPAADPTGAPAAEAAQPQAQVAAHPEQTAPWTEKELQPSEKMVSGAKDLVCSKMSRAKDAVSSGVASVVDVATGVVQGGLDTTRSALTGTKEAVSSGFTGAMDMAKGAVQGGLDTSKAVLTGTKDTVSTGLTGAVNVAKGTVQAGVDTTKTVLTGTKDTVTTGVMGAVNLAKGTVQTGVETSKAVLTGTKDAVSTGLTGAVNVARGSIQTGVDTSKTVLTGTKDTVCSGVTSAMNVAKGTIQTGVDTSKTVLTGTKDTVCSGVTGAVNVAKGTVQTGVDTAKTVLSGAKDAVTTGVTGAVNVAKGTVQTGVDASKAVLMGTKDTVFSGVTGAMSMAKGAVQGGLDTTKTVLTGTKDAVSAGLMGSGNVATGATHTGLSTFQNWLPSTPATSWGGLTSSRTTDNGGEQTALSPQEAPFSGISTPPDVLSVGPEPAWEAAATTKGLATDVATFTQGAAPGREDTGLLTTTHGPEEAPRLAMLQNELEGLGDIFHPMNAEEQAQLAASQPGPKVLSAEQGSYFVRLGDLGPSFRQRAFEHAVSHLQHGQFQARDTLAQLQDCFRLIEKAQQAPEGQPRLDQGSGASAEDAAVQEERDAGVLSRVCGLLRQLHTAYSGLVSSLQGLPAELQQPVGRARHSLCELYGIVASAGSVEELPAERLVQSREGVHQAWQGLEQLLEGLQHNPPLSWLVGPFALPAGGQLE

SEQ ID NO: 801 - DNA, 810 bp, Homo sapiens
  CDS (123)..(791)
aggcctgcaggtgggtgtcgggctgctcaggctttcagtggggagtgggtgtgggatgggaggctagggaacccccattcacgcaccttctctgcccccttccagcttctcacgttctcactatgtctgctccagacgaagggagacgggatccccccaaaccgaagggcaagaccctgggcagcttctttgggtccctgcctggcttcaactctgcccggaacctggtggccaacgcacatagctcggcgagagcccggccggccgctgaccccacaggagcgcctgctgccgaggctgcccaaccacaggctcaggtggctgcccacccagagcagacggccccatggacggagaaggagctgcaaccttcggaaaagattgaaaaggcccagcaggctccagaagggcagccacgtctggaccagggctcaggtgccagtgcggaggacgctgctgtccaggaggagcgggatgccggggttctgtccagggtctgcggccttctccggcagctgcacacggcctacagtggcctggtctccagcctccggggcctgcccgccgagctccagcagccagtggggcgggcgcggcacagcctctgtgagctctatggcatcgtggcctcagctggctctgtagaggagctgcccgcagagcggctggtgcagagccgcgagggtgtgcaccaggcttggcaggggttagagcagctgctggagggcctacagcacaatcccccgctcagctggctggtagggcccttcgccttgcccgctggcgggcagtagctgtaggagcctgcag

SEQ ID NO: 802 - protein, 223 aa, Homo sapiens
MSAPDEGRRDPPKPKGKTLGSFFGSLPGFNSARNLVANAHSSARARPAADPTGAPAAEAAQPQAQVAAHPEQTAPWTEKELQPSEKIEKAQQAPEGQPRLDQGSGASAEDAAVQEERDAGVLSRVCGLLRQLHTAYSGLVSSLRGLPAELQQPVGRARHSLCELYGIVASAGSVEELPAERLVQSREGVHQAWQGLEQLLEGLQHNPPLSWLVGPFALPAGGQ

SEQ ID NO: 803 - DNA, 714 bp, Homo sapiens
  CDS (2)..(691)
ggcgcgcccacccttcaccaccatgtctgctccagacgaagggagacgggatccccccaaaccgaagggcaagaccctgggcagcttctttgggtccctgcctggcttcagctctgcccggaacctggtggccaacgcacatagctcggcgagagcccggccggccgctgaccccacaggagcgcctgctgccgaggctgcccaaccacaggctcaggtggctgcccacccagagcagacggccccatggacggagaaggagctgcaaccttcggaaaagattgaaaaggcccagcaggctccagaagggcagccacgtctggaccagggctcaggtgccagtgcggaggacgctgctgtccaggaggagcgggatgccggggttctgtccagggtctgcggccttctccggcagctgcacacggcctacagtggcctggtctccagcctccagggcctgcccgccgagctccagcagccagtggggcgggcgcggcacagcctctgtgagctctatggcatcgtggcctcagctggctctgtagaggagctgcccgcagagcggctggtgcagagccgcgagggtgtgcaccaggcttggcaggggttagagcagctgctggagggcctacagcacaatcccccgctcagctggctggtagggcccttcgccttgcccgctggcgggcagtgaagggggcggccgcggagcct

SEQ ID NO: 804 - protein, 230 aa, Homo sapiens
ARPPFTTMSAPDEGRRDPPKPKGKTLGSFFGSLPGFSSARNLVANAHSSARARPAADPTGAPAAEAAQPQAQVAAHPEQTAPWTEKELQPSEKIEKAQQAPEGQPRLDQGSGASAEDAAVQEERDAGVLSRVCGLLRQLHTAYSGLVSSLQGLPAELQQPVGRARHSLCELYGIVASAGSVEELPAERLVQSREGVHQAWQGLEQLLEGLQHNPPLSWLVGPFALPAGGQ

SEQ ID NO: 805 - DNA, 714 bp, Homo sapiens; identical to SEQ ID NO: 803
  CDS (23)..(691)

SEQ ID NO: 806 - protein, 223 aa, Homo sapiens
MSAPDEGRRDPPKPKGKTLGSFFGSLPGFSSARNLVANAHSSARARPAADPTGAPAAEAAQPQAQVAAHPEQTAPWTEKELQPSEKIEKAQQAPEGQPRLDQGSGASAEDAAVQEERDAGVLSRVCGLLRQLHTAYSGLVSSLQGLPAELQQPVGRARHSLCELYGIVASAGSVEELPAERLVQSREGVHQAWQGLEQLLEGLQHNPPLSWLVGPFALPAGGQ

SEQ ID NO: 807 - DNA, 3839 bp, Homo sapiens
  CDS (131)..(3805)
gtgaggccaggcctgcaggtgggtgtcgggctgctcaggctttcagtggggagtgggtgtgggatgggaggctagggaacccccattcacgcaccttctctgcccccttccagcttctcacgttctcactatgtctgctccagacgaagggagacgggatccccccaaaccgaagggcaagccccccgcccccatgcagaccctgggcagcttctttgggtccctgcctggcttcagctctgcccggaacctggtggccaacgcacatagctcggtcggggccaaagacctggtgtgttccaagatgtccagggccaaggatgccgtgtcctccggggtggccagcgtggtggacgtggctaagggagtggtccagggaggcctggacaccactcggtctgcacttacgggcaccaaggaggtggtgtccagcggggtcacaggggccatggacatggctaagggggccgtccaagggggtctggacacctcgaaggctgtcctcaccggcaccaaggacacggtgtccactgggctcacgggggcagtgaatgtggccaaagggaccgtacaggccggtgtggacaccaccaagactgtgctgaccggcaccaaagacacagtgactactggggtcatgggggcagtgaacttggccaaagggactgtccagactggcgtggaaacctccaaggctgtgctgaccggcaccaaagatgctgtgtccactgggctcacaggggcagtgaatgtggccagaggaagcattcagaccggtgtggacaccagtaagactgtcctaacaggtaccaaggacaccgtctgtagtggggtgactggtgccatgaatgtggccaaaggaaccatccagaccggcgtggacaccagtaagactgtcctaacaggtaccaaggacaccgtctgtagtggggtgactggtgccatgaatgtggccaaaggaaccatccagaccggcgtggacaccagtaagactgtcctaacaggtaccaaggacaccgtctgtagtggggtgactggtgccatgaatgtggccaaaggaaccatccagaccggcgtggacaccaccaagactgtcctaactggcaccaagaacactgtctgcagtggggtgaccggtgccgtgaacttggccaaagaggccatccaggggggcctggataccaccaagtctatggtcatgggtacgaaagacacgatgtccactgggctcacaggggcagcgaatgtggccaagggggccatgcaaactgggctgaacacaacccaaaatatcgcaacaggtacaaaggacaccgtctgcagtggggtgactggtgccatgaatttggccagaggaaccatccagacaggcgtggacaccaccaagatcgttctaactggtaccaaggacactgtctgcagtggggtcaccggtgctgcgaatgtggccaaaggggccgtccagggcggcctggacactacaaagtctgtcctgactggcactaaagatgctgtgtccactgggctcacaggggctgtgaacgtggccaaagggaccgtccagaccggcgtagacaccaccaagactgtcctaaccggcaccaaggacaccgtctgcagtggggtgaccagtgctgtgaacgtggccaaaggggccgtccaggggggcctggacaccaccaagtctgtggtcataggtacaaaagacacgatgtccactgggctcacgggggcagcgaatgtggccaagggggctgtccagacaggtgtagacacagccaagaccgtgctgaccggcaccaaggacacagtgactactgggctcgtgggggcagtgaatgtcgccaaagggaccgtccagacaggcatggacaccaccaaaactgtcctaaccggtaccaaggacaccatctacagtggggtcaccagtgccgtgaacgtggccaagggggctgtgcaaactgggctgaaaacgacccaaaatatcgcgacaggtacaaagaacacctttggcagtggggtgaccagtgctgtgaatgtggccaaaggggctgcccagacaggtgtagacacggccaagaccgtgctgaccggcaccaaggacacagtcactactgggctcatgggggcagtgaatgtcgccaaagggactgtccagaccagtgtggacaccaccaagactgtcctaactggtaccaaggacaccgtctgcagtggggtgaccggtgctgcgaatgtggccaaaggggccatccaagggggcctggacactacaaagtctgtcctgactggcactaaagatgctgtgtccactgggctcacaggggctgtgaagttggccaaagggactgtccagaccggcatggacaccaccaagactgtgttaactggtaccaaggatgctgtgtgcagtggggtgaccggtgctgcgaatgtggccaagggggccgtccagatgggtgtagacacggccaagaccgtgctgaccggtaccaaggacactgtctgcagtggggtcaccggtgctgcgaacgtggccaagggtgctgtgcaaactgggctgaaaacgacccaaaatatcgcaacaggtacaaagaacacccttggcagtggggtgaccggtgctgcgaaagtggccaaaggggccgtccaggggggcctggacactacaaagtctgtcctgactggcactaaagatgccgtgtccactgggctcacaggggctgtgaacttggccaaagggactgtccagaccggcgtggacaccagcaagactgtcctgaccggtaccaaggacaccgtctgcagtggagtcactggtgccgtaaatgtggccaaagggaccgtccagacaggtgtggacacagccaagacggtgctgagtggcgctaaggatgcagtgactactggagtcacgggggcagtgaatgtggccaaaggaaccgtgcagaccggcgtggacgcctccaaggctgtgcttatgggtaccaaggacactgtcttcagtggggttaccggtgccatgagcatggccaaaggggccgtccaggggggcctggacaccaccaagacagtgctgaccggaaccaaagacgcagtgtccgctgggctcatggggtcagggaacgtggcgacaggggccacccacactggcctcagcaccttccagaactggttacctagtacccccgccacctcctggggtggactcaccagttccaggaccacagctcagctggctgcctcccagcctgggccaaaggtgctgtcggcggaacaggggagctacttcgttcgtttaggtgacctgggtcccagcttccgccagcgggcatttgaacacgcggtgagccacctgcagcacggccagttccaagccagggacactctggtccagctccaggactgcttcaggctgattgaaaaggcccagcaggctccagaagggcagccacgtctggaccagggctcaggtgccagtgcggaggacgctgctgtccaggagagggtctgcggccttctccggcagctgcacacggcctacagtggcctggtctccagcctccagggcctgcccgccgagctccagcagccagtggggcgggcgcggcacagcctctgtgagctctatggcatcgtggcctcagctggctctgtagaggagctgcccgcagagcggctggtgcagagccgcgagggtgtgcaccaggcttggcaggggttagagcagctgctggagggcctacagcacaatcccccgctcagctggctggtagggcccttcgccttgcccgctggcgggcagtagctgtaggagcctgcaggcccggcgcggggtc

SEQ ID NO: 808 - protein, 1225 aa, Homo sapiens
MSAPDEGRRDPPKPKGKPPAPMQTLGSFFGSLPGFSSARNLVANAHSSVGAKDLVCSKMSRAKDAVSSGVASVVDVAKGVVQGGLDTTRSALTGTKEVVSSGVTGAMDMAKGAVQGGLDTSKAVLTGTKDTVSTGLTGAVNVAKGTVQAGVDTTKTVLTGTKDTVTTGVMGAVNLAKGTVQTGVETSKAVLTGTKDAVSTGLTGAVNVARGSIQTGVDTSKTVLTGTKDTVCSGVTGAMNVAKGTIQTGVDTSKTVLTGTKDTVCSGVTGAMNVAKGTIQTGVDTSKTVLTGTKDTVCSGVTGAMNVAKGTIQTGVDTTKTVLTGTKNTVCSGVTGAVNLAKEAIQGGLDTTKSMVMGTKDTMSTGLTGAANVAKGAMQTGLNTTQNIATGTKDTVCSGVTGAMNLARGTIQTGVDTTKIVLTGTKDTVCSGVTGAANVAKGAVQGGLDTTKSVLTGTKDAVSTGLTGAVNVAKGTVQTGVDTTKTVLTGTKDTVCSGVTSAVNVAKGAVQGGLDTTKSVVIGTKDTMSTGLTGAANVAKGAVQTGVDTAKTVLTGTKDTVTTGLVGAVNVAKGTVQTGMDTTKTVLTGTKDTIYSGVTSAVNVAKGAVQTGLKTTQNIATGTKNTFGSGVTSAVNVAKGAAQTGVDTAKTVLTGTKDTVTTGLMGAVNVAKGTVQTSVDTTKTVLTGTKDTVCSGVTGAANVAKGAIQGGLDTTKSVLTGTKDAVSTGLTGAVKLAKGTVQTGMDTTKTVLTGTKDAVCSGVTGAANVAKGAVQMGVDTAKTVLTGTKDTVCSGVTGAANVAKGAVQTGLKTTQNIATGTKNTLGSGVTGAAKVAKGAVQGGLDTTKSVLTGTKDAVSTGLTGAVNLAKGTVQTGVDTSKTVLTGTKDTVCSGVTGAVNVAKGTVQTGVDTAKTVLSGAKDAVTTGVTGAVNVAKGTVQTGVDASKAVLMGTKDTVFSGVTGAMSMAKGAVQGGLDTTKTVLTGTKDAVSAGLMGSGNVATGATHTGLSTFQNWLPSTPATSWGGLTSSRTTAQLAASQPGPKVLSAEQGSYFVRLGDLGPSFRQRAFEHAVSHLQHGQFQARDTLVQLQDCFRLIEKAQQAPEGQPRLDQGSGASAEDAAVQERVCGLLRQLHTAYSGLVSSLQGLPAELQQPVGRARHSLCELYGIVASAGSVEELPAERLVQSREGVHQAWQGLEQLLEGLQHNPPLSWLVGPFALPAGGQ

SEQ ID NO: 809 - DNA, 3839 bp, Homo sapiens
  CDS (131)..(3805)
gtgaggccaggcctgcaggtgggtgtcgggctgctcaggctttcagtggggagtgggtgtgggatgggaggctagggaacccccattcacgcaccttctctgcccccttccagcttctcacgttctcactatgtctgctccagacgaagggagacgggatccccccaaaccgaagggcaagccccccgcccccatgcagaccctgggcagcttctttgggtccctgcctggcttcagctctgcccggaacctggtggccaacgcacatagctcggtcggggccaaagacctggtgtgttccaagatgtccagggccaaggatgccgtgtcctccggggtggccagcgtggtggacgtggctaagggagtggtccagggaggcctggacaccactcggtctgcacttacgggcaccaaggaggtggtgtccagcggggtcacaggggccatggacatggctaagggggccgtccaagggggtctggacacctcgaaggctgtcctcaccggcaccaaggacacggtgtccactgggctcacgggggcagtgaatgtggccaaagggaccgtacaggccggtgtggacaccaccaagactgtgctgaccggcaccaaagacacagtgactactggggtcatgggggcagtgaacttggccaaagggactgtccagactggcgtggaaacctccaaggctgtgctgaccggcaccaaagatgctgtgtccactgggctcacaggggcagtgaatgtggccagaggaagcattcagaccggtgtggacaccagtaagactgtcctaacaggtaccaaggacaccgtctgtagtggggtgactggtgccatgaatgtggccaaaggaaccatccagaccggcgtggacaccagtaagactgtcctaacaggtaccaaggacaccgtctgtagtggggtgactggtgccatgaatgtggccaaaggaaccatccagaccggcgtggacaccagtaagactgtcctaacaggtaccaaggacaccgtctgtagtggggtgactggtgccatgaatgtggccaaaggaaccatccagaccggcgtggacaccaccaagactgtcctaactggcaccaagaacactgtctgcagtggggtgaccggtgccgtgaacttggccaaagaggccatccaggggggcctggataccaccaagtctatggtcatgggtacgaaagacacgatgtccactgggctcacaggggcagcgaatgtggccaagggggccatgcaaactgggctgaacacaacccaaaatatcgcaacaggtacaaaggacaccgtctgcagtggggtgactggtgccatgaatttggccagaggaaccatccagacaggcgtggacaccaccaagatcgttctaactggtaccaaggacactgtctgcagtggggtcaccggtgctgcgaatgtggccaaaggggccgtccagggcggcctggacactacaaagtctgtcctgactggcactaaagatgctgtgtccactgggctcacaggggctgtgaacgtggccaaagggaccgtccagaccggcgtagacaccaccaagactgtcctaaccggcaccaaggacaccgtctgcagtggggtgaccagtgctgtgaacgtggccaaaggggccgtccaggggggcctggacaccaccaagtctgtggtcataggtacaaaagacacgatgtccactgggctcacgggggcagcgaatgtggccaagggggctgtccagacaggtgtagacacagccaagaccgtgctgaccggcaccaaggacacagtgactactgggctcgtgggggcagtgaatgtcgccaaagggaccgtccagacaggcatggacaccaccaaaactgtcctaaccggtaccaaggacaccatctacagtggggtcaccagtgccgtgaacgtggccaagggggctgtgcaaactgggctgaaaacgacccaaaatatcgcgacaggtacaaagaacacctttggcagtggggtgaccagtgctgtgaatgtggccaaaggggctgcccagacaggtgtagacacggccaagaccgtgctgaccggcaccaaggacacagtcactactgggctcatgggggcagtgaatgtcgccaaagggactgtccagaccagtgtggacaccaccaagactgtcctaactggtaccaaggacaccgtctgcagtggggtgaccggtgctgcgaatgtggccaaaggggccatccaagggggcctggacactacaaagtctgtcctgactggcactaaagatgctgtgtccactgggctcacaggggctgtgaagttggccaaagggactgtccagaccggcatggacaccaccaagactgtgttaactggtaccaaggatgctgtgtgcagtggggtgaccggtgctgcgaatgtggccaagggggccgtccagatgggtgtagacacggccaagaccgtgctgaccggtaccaaggacactgtctgcagtggggtcaccggtgctgcgaacgtggccaagggtgctgtgcaaactgggctgaaaacgacccaaaatatcgcaacaggtacaaagaacacccttggcagtggggtgaccggtgctgcgaaagtggccaaaggggccgtccaggggggcctggacactacaaagtctgtcctgactggcactaaagatgccgtgtccactgggctcacaggggctgtgaacttggccaaagggactgtccagaccggcgtggacaccagcaagactgtcctgaccggtaccaaggacaccgtctgcagtggagtcactggtgccgtaaatgtggccaaagggaccgtccagacaggtgtggacacagccaagacggtgctgagtggcgctaaggatgcagtgactactggagtcacgggggcagtgaatgtggccaaaggaaccgtgcagaccggcgtggacgcctccaaggctgtgcttatgggtaccaaggacactgtcttcagtggggttaccggtgccatgagcatggccaaaggggccgtccaggggggcctggacaccaccaagacagtgctgaccggaaccaaagacgcagtgtccgctgggctcatggggtcagggaacgtggcgacaggggccacccacactggcctcagcaccttccagaactggttacctagtacccccgccacctcctggggtggactcaccagttccaggaccacagctcagctggctgcctcccagcctgggccaaaggtgctgtcggcggaacaggggagctacttcgttcgtttaggtgacctgggtcccagcttccgccagcgggcatttgaacacgcggtgagccacctgcagcacggccagttccaagccagggacactctggcccagctccaggactgtttcaggctgattgaaaaggcccagcaggctccagaagggcagccacgtctggaccagggctcaggtgccagtgcggaggacgctgctgtccaggagagggtctgcggccttctccggcagctgcacacggcctacagtggcctggtctccagcctccagggcctgcccgccgagctccagcagccagtggggcgggcgcggcacagcctctgtgagctctatggcatcgtggcctcagctggctctgtagaggagctgcccgcagagcggctggtgcagagccgcgagggtgtgcaccaggcttggcaggggttagagcagctgctggagggcctacagcacaatcccccgctcagctggctggtagggcccttcgccttgcccgctggcgggcagtagctgtaggagcctgcaggcccggcgcggggtc

SEQ ID NO: 810 - protein, 1225 aa, Homo sapiens; identical to SEQ ID NO: 798

SEQ ID NO: 811 - DNA, 3839 bp, Homo sapiens
  CDS (131)..(3805)
gtgaggccaggcctgcaggtgggtgtcgggctgctcaggctttcagtggggagtgggtgtgggatgggaggctagggaacccccattcacgcaccttctctgcccccttccagcttctcacgttctcactatgtctgctccagacgaagggagacgggatccccccaaaccgaagggcaagccccccgcccccatgcagaccctgggcagcttctttgggtccctgcctggcttcagctctgcccggaacctggtggccaacgcacatagctcggtcggggccaaagacctggtgtgttccaagatgtccagggccaaggatgccgtgtcctccggggtggccagcgtggtggacgtggctaagggagtggtccagggaggcctggacaccactcggtctgcacttacgggcaccaaggaggtggtgtccagcggggtcacaggggccatggacatggctaagggggccgtccaagggggtctggacacctcgaaggctgtcctcaccggcaccaaggacacggtgtccactgggctcacgggggcagtgaatgtggccaaagggaccgtacaggccggtgtggacaccaccaagactgtgctgaccggcaccaaagacacagtgactactggggtcatgggggcagtgaacttggccaaagggactgtccagactggcgtggaaacctccaaggctgtgctgaccggcaccaaagatgctgtgtccactgggctcacaggggcagtgaatgtggccagaggaagcattcagaccggtgtggacaccagtaagactgtcctaacaggtaccaaggacaccgtctgtagtggggtgactggtgccatgaatgtggccaaaggaaccatccagaccggcgtggacaccagtaagactgtcctaacaggtaccaaggacaccgtctgtagtggggtgactggtgccatgaatgtggccaaaggaaccatccagaccggcgtggacaccagtaagactgtcctaacaggtaccaaggacaccgtctgtagtggggtgactggtgccatgaatgtggccaaaggaaccatccagaccggcgtggacaccaccaagactgtcctaactggcaccaagaacactgtctgcagtggggtgaccggtgccgtgaacttggccaaagaggccatccaggggggcctggataccaccaagtctatggtcatgggtacgaaagacacgatgtccactgggctcacaggggcagcgaatgtggccaagggggccatgcaaactgggctgaacacaacccaaaatatcgcaacaggtacaaaggacaccgtctgcagtggggtgactggtgccatgaatttggccagaggaaccatccagacaggcgtggacaccaccaagatcgttctaactggtaccaaggacactgtctgcagtggggtcaccggtgctgcgaatgtggccaaaggggccgtccagggcggcctggacactacaaagtctgtcctgactggcactaaagatgctgtgtccactgggctcacaggggctgtgaacgtggccaaagggaccgtccagaccggcgtagacaccaccaagactgtcctaaccggcaccaaggacaccgtctgcagtggggtgaccagtgctgtgaacgtggccaaaggggccgtccaggggggcctggacaccaccaagtctgtggtcataggtacaaaagacacgatgtccactgggctcacgggggcagcgaatgtggccaagggggctgtccagacaggtgtagacacagccaagaccgtgctgaccggcaccaaggacacagtgactactgggctcgtgggggcagtgaatgtcgccaaagggaccgtccagacaggcatggacaccaccaaaactgtcctaaccggtaccaaggacaccatctacagtggggtcaccagtgccgtgaacgtggccaagggggctgtgcaaactgggctgaaaacgacccaaaatatcgcgacaggtacaaagaacacctttggcagtggggtgaccagtgctgtgaatgtggccaaaggggctgcccagacaggtgtagacacggccaagaccgtgctgaccggcaccaaggacacagtcactactgggctcatgggggcagtgaatgtcgccaaagggactgtccagaccagtgtggacaccaccaagactgtcctaactggtaccaaggacaccgtctgcagtggggtgaccggtgctgcgaatgtggccaaaggggccatccaagggggcctggacactacaaagtctgtcctgactggcactaaagatgctgtgtccactgggctcacaggggctgtgaagttggccaaagggactgtccagaccggcatggacaccaccaagactgtgttaactggtaccaaggatgctgtgtgcagtggggtgaccggtgctgcgaatgtggccaagggggccgtccagatgggtgtagacacggccaagaccgtgctgaccggtaccaaggacactgtctgcagtggggtcaccggtgctgcgaacgtggccaagggtgctgtgcaaactgggctgaaaacgacccaaaatatcgcaacaggtacaaagaacacccttggcagtggggtgaccggtgctgcgaaagtggccaaaggggccgtccaggggggcctggacactacaaagtctgtcctgactggcactaaagatgccgtgtccactgggctcacaggggctgtgaacttggccaaagggactgtccagaccggcgtggacaccagcaagactgtcctgaccggtaccaaggacaccgtctgcagtggagtcactggtgccgtaaatgtggccaaagggaccgtccagacaggtgtggacacagccaagacggtgctgagtggcgctaaggatgcagtgactactggagtcacgggggcagtgaatgtggccaaaggaaccgtgcagaccggcgtggacgcctccaaggctgtgcttatgggtaccaaggacactgtcttcagtggggttaccggtgccatgagcatggccaaaggggccgtccaggggggcctggacaccaccaagacagtgctgaccggaaccaaagacgcagtgtccgctgggctcatggggtcagggaacgtggcgacaggggccacccacactggcctcagcaccttccagaactggttacctagtacccccgccacctcctggggtggactcaccagttccaggaccacagctcagctggctgcctcccagcctgggccaaaggtgctgtcggcggaacaggggagctacttcgttcgtttaggtgacctgggtcccagcttccgccagcgggcatttgaacacgcggtgagccacctgcagcacggccagttccaagccagggacactctggcccagctccaggactgcttcaggctgattgaaaaggcccagcaggctccagaagggcagccacgtctggaccagggctcaggtgccagtgcggaggacgctgctgtccaggagagggtctgcggccttctccggcagctgcacacggcctacagtggcctggtctccagcctccagggcctgcccgccgagctccagcagccagtggggcgggcgcggcacagcctctgtgagctctatggcatcgtggcctcagctggctctgtagaggagctgcccgcagagcggccggtgcagagccgcgagggtgtgcaccaggcttggcaggggttagagcagctgctggagggcctacagcacaatcccccgctcagctggctggtagggcccttcgccttgcccgctggcgggcagtagctgtaggagcctgcaggcccggcgcggggtc

SEQ ID NO: 812 - protein, 1225 aa, Homo sapiens
MSAPDEGRRDPPKPKGKPPAPMQTLGSFFGSLPGFSSARNLVANAHSSVGAKDLVCSKMSRAKDAVSSGVASVVDVAKGVVQGGLDTTRSALTGTKEVVSSGVTGAMDMAKGAVQGGLDTSKAVLTGTKDTVSTGLTGAVNVAKGTVQAGVDTTKTVLTGTKDTVTTGVMGAVNLAKGTVQTGVETSKAVLTGTKDAVSTGLTGAVNVARGSIQTGVDTSKTVLTGTKDTVCSGVTGAMNVAKGTIQTGVDTSKTVLTGTKDTVCSGVTGAMNVAKGTIQTGVDTSKTVLTGTKDTVCSGVTGAMNVAKGTIQTGVDTTKTVLTGTKNTVCSGVTGAVNLAKEAIQGGLDTTKSMVMGTKDTMSTGLTGAANVAKGAMQTGLNTTQNIATGTKDTVCSGVTGAMNLARGTIQTGVDTTKIVLTGTKDTVCSGVTGAANVAKGAVQGGLDTTKSVLTGTKDAVSTGLTGAVNVAKGTVQTGVDTTKTVLTGTKDTVCSGVTSAVNVAKGAVQGGLDTTKSVVIGTKDTMSTGLTGAANVAKGAVQTGVDTAKTVLTGTKDTVTTGLVGAVNVAKGTVQTGMDTTKTVLTGTKDTIYSGVTSAVNVAKGAVQTGLKTTQNIATGTKNTFGSGVTSAVNVAKGAAQTGVDTAKTVLTGTKDTVTTGLMGAVNVAKGTVQTSVDTTKTVLTGTKDTVCSGVTGAANVAKGAIQGGLDTTKSVLTGTKDAVSTGLTGAVKLAKGTVQTGMDTTKTVLTGTKDAVCSGVTGAANVAKGAVQMGVDTAKTVLTGTKDTVCSGVTGAANVAKGAVQTGLKTTQNIATGTKNTLGSGVTGAAKVAKGAVQGGLDTTKSVLTGTKDAVSTGLTGAVNLAKGTVQTGVDTSKTVLTGTKDTVCSGVTGAVNVAKGTVQTGVDTAKTVLSGAKDAVTTGVTGAVNVAKGTVQTGVDASKAVLMGTKDTVFSGVTGAMSMAKGAVQGGLDTTKTVLTGTKDAVSAGLMGSGNVATGATHTGLSTFQNWLPSTPATSWGGLTSSRTTAQLAASQPGPKVLSAEQGSYFVRLGDLGPSFRQRAFEHAVSHLQHGQFQARDTLAQLQDCFRLIEKAQQAPEGQPRLDQGSGASAEDAAVQERVCGLLRQLHTAYSGLVSSLQGLPAELQQPVGRARHSLCELYGIVASAGSVEELPAERPVQSREGVHQAWQGLEQLLEGLQHNPPLSWLVGPFALPAGGQ

SEQ ID NO: 813 - DNA, 840 bp, Homo sapiens
  CDS (2)..(835)
ggcctccgggatttgctacctttttggctccctgctcgtcgaactgctcttctcacgggctgtcgccttcaatctggacgtgatgggtgccttgcgcaaggagggcgagccaggcagcctcttcggcttctctgtggccctgcaccggcagttgcagccccgaccccagagctggctgctggtgggtgctccccaggccctggctcttcctgggcagcaggcgaatcgcactggaggcctcttcgcttgcccgttgagcctggaggagactgactgctacagagtggacatcgaccagggagctgatatgcaaaaggaaagcaaggagaaccagtggttgggagtcagtgttcggagccaggggcctgggggcaagattgttgactgcgcccggggcacggccaactgtgtggtgttcagctgcccactctacagctttgaccgcgcggctgtgctgcatgtctggggccgtctctggaacagcacctttctggaggagtactcagctgtgaagtccctggaagtgattgtccgggccaacatcacagtgaagtcctccataaagaacttgatgctccgagatgcctccacagtgatcccagtgatggtatacttggaccccatggctgtggtggcagaaggagtgccctggtgggtcatcctcctggctgtactggctgggctgctggtgctagcactgctggtgctgctcctgtggaagtgtggcttcttccatcggagcagccagagctcatcttttcccaccaactatcaccgggcctgtctggctgtgcagccttcagccatggaagttgggggtccagggactgtggggtaact

SEQ ID NO: 814 - protein, 278 aa, Homo sapiens
ASGICYLFGSLLVELLFSRAVAFNLDVMGALRKEGEPGSLFGFSVALHRQLQPRPQSWLLVGAPQALALPGQQANRTGGLFACPLSLEETDCYRVDIDQGADMQKESKENQWLGVSVRSQGPGGKIVDCARGTANCVVFSCPLYSFDRAAVLHVWGRLWNSTFLEEYSAVKSLEVIVRANITVKSSIKNLMLRDASTVIPVMVYLDPMAVVAEGVPWWVILLAVLAGLLVLALLVLLLWKCGFFHRSSQSSSFPTNYHRACLAVQPSAMEVGGPGTVG

SEQ ID NO: 815 - DNA, 780 bp, Homo sapiens
  CDS (1)..(780)
ggatccttcaatctggacgtgatgggtgccttgcgcaaggagggcgagccaggcagcctcttcggcttctctgtggccctgcaccggcagttgcagccccgaccccagagctggctgctggtgggtgctccccaggccctggctcttcctgggcagcaggcgaatcgcactggaggcctcttcgcttgcccgttgagcctggaggagactgactgctacagagtggacatcgaccagggagctgatatgcaaaaggaaagcaaggagaaccagtggttgggagtcagtgttcggagccaggggcctgggggcaagattgttgactgcgcccggggcacggccaactgtgtggtgttcagctgcccactctacagctttgaccgcgcggctgtgctgcatgtctggggccgtctctggaacagcacctttctggaggagtactcagctgtgaagtccctggaagtgattgtccgggccaacatcacagtgaagtcctccataaagaacttgatgctccgagatgcctccacagtgatcccagtgatggtatacttggaccccatggctgtggtggcagaaggagtgccctggtgggtcatcctcctggctgtactggctgggctgctggtgctagcactgctggtgctgctcctgtggaagtgtggcttcttccatcggagcagccagagctcatcttttcccaccaactatcaccgggcctgtctggctgtgcagccttcagccatggaagttgggggtccagggactgtggggctcgag

SEQ ID NO: 816 - protein, 260 aa, Homo sapiens
GSFNLDVMGALRKEGEPGSLFGFSVALHRQLQPRPQSWLLVGAPQALALPGQQANRTGGLFACPLSLEETDCYRVDIDQGADMQKESKENQWLGVSVRSQGPGGKIVDCARGTANCVVFSCPLYSFDRAAVLHVWGRLWNSTFLEEYSAVKSLEVIVRANITVKSSIKNLMLRDASTVIPVMVYLDPMAVVAEGVPWWVILLAVLAGLLVLALLVLLLWKCGFFHRSSQSSSFPTNYHRACLAVQPSAMEVGGPGTVGLE

SEQ ID NO: 817 - DNA, 567 bp, Homo sapiens
  CDS (1)..(567)
ggatccttcaatctggacgtgatgggtgccttgcgcaaggagggcgagccaggcagcctcttcggcttctctgtggccctgcaccggcagttgcagccccgaccccagagctggctgctggtgggtgctccccaggccctggctcttcctgggcagcaggcgaatcgcactggaggcctcttcgcttgcccgttgagcctggaggagactgactgctacagagtggacatcgaccagggagctgatatgcaaaaggaaagcaaggagaaccagtggttgggagtcagtgttcggagccaggggcctgggggcaagattgttgactgcgcccggggcacggccaactgtgtggtgttcagctgcccactctacagctttgaccgcgcggctgtgctgcatgtctggggccgtctctggaacagcacctttctggaggagtactcagctgtgaagtccctggaagtgattgtccgggccaacatcacagtgaagtcctccataaagaacttgatgctccgagatgcctccacagtgatcccagtgatggtatacttggaccccctcgag

SEQ ID NO: 818 - protein, 189 aa, Homo sapiens
GSFNLDVMGALRKEGEPGSLFGFSVALHRQLQPRPQSWLLVGAPQALALPGQQANRTGGLFACPLSLEETDCYRVDIDQGADMQKESKENQWLGVSVRSQGPGGKIVDCARGTANCVVFSCPLYSFDRAAVLHVWGRLWNSTFLEEYSAVKSLEVIVRANITVKSSIKNLMLRDASTVIPVMVYLDPLE

SEQ ID NO: 819 - DNA, 2106 bp, Homo sapiens
  CDS (1)..(1635)
tcccgagactttggaagttctcagctattactttattacataggatttctgtgtcttttctcatctcttttccttttggaaagacccccaaagggaaagtgtcccctgcgctgctcctgctctaaagacagcgccctgtgtgagggctccccggacctgcccgtcagcttctctccgaccctgctgtcactgtcactcgtcaggacgggagtcacccagctgaaggccggcagcttcctgagaattccgtctctgcacctgctgctcttcacctccaactccttctccgtgattgaggacgatgcatttgcgggcctgtcccacctgcagtacctgttcatcgaggacaatgagattggctccatctctaagaatgccctcagaggacttcgctcgcttacacacctgagcctggccaataaccatctggagaccctccccagattcctgttccgaggcctggacacccttactcatgtggacctccgcgggaacccgttccagtgtgactgccgcgtcctctggctcctgcagtggatgcccaccgtgaatgccagcgtggggaccggcgcctgtgcgggccccgcctccctgagccacatgcagctccaccacctcgaccccaagactttcaagtgcccacccacagagctgtcctggttccagacggtgggggagtcggcactgagcgtagagcccttctcctaccaaggggagcctcacattgtgctggcacagcccttcgccggccgctgcctgattctctcctgggactacagcctgcagcgcttccggcccgaggaagagctgcccacagcggcctccgtggtgtcctgcaagccactggtgctgggcccgagcctcttcgtgctggctgcccgcctgtgggggggctcacagctgtgggcccggcccagtcccggcctgcgcctggccccaacgcagaccctggccccgcggcggctgctgcggcccaatgacgccgagctcctgtggctggaagggcaaccctgcttcgtggtggccgatgcctccaaggcgggcagcaccacgctgctgtgccgcgacgggcccggcttttacccgcaccagagcctgcacgcctggcaccgggacacggacgctgaggccctggagctggacggccggccccacctgctgctggcctcggcttcccagcggcccgtgctcttccactggaccggtggccgcttcgagagacgcacggacatccccgaggccgaggatgtctatgccacacgccacttccaggctggtggggacgtgttcctgtgcctcacacgctacattggggactccatggtgatgcgctgggacggctccatgtttcgtctgctgcagcaacttccctcgcgcggtgcccacgtcttccagccactgctcatcgccagggaccagttggccatcctaggcagcgacttcgccttcagccaggtcctccgccttgagcctgacaaggggctcctggagccactgcaggagctggggcctccggccctggtggccccccgtgcctttgcccacatcactatggccggcagacgcttcctctttgctgcttgctttaagggccccacacagatctaccagcatcacgagatcgacctcagtgcctgagaccaccaacgggactctgggcatggctggggcccctggacggccccttggctggctcctggccctacttggggtgatggtccgcctgtgagctgctgaccgtgggccacgttcatcagccacacgtctaggccttaagcccacttcttaaaggatctgcacccatggggggacatagagggtcccagcctactggacctcccgagctgcccttcaggtctaaagcaacatctggacatctcggctggggcagattccccatcaaaggcaacctggggggtgcaggctggtgcactgcatggagtcgaggtggaggtcacgtgcagagctccatgaggtcccggagcccccctctcaacccgctcctaccccgctggtccctctgaaagcaccgaggggttgatggcattcctttcccattctaaactccacgcagccaatcgctttcctggaggagcgccaacctcg

SEQ ID NO: 820 - protein, 545 aa, Homo sapiens
SRDFGSSQLLLYYIGFLCLFSSLFLLERPPKGKCPLRCSCSKDSALCEGSPDLPVSFSPTLLSLSLVRTGVTQLKAGSFLRIPSLHLLLFTSNSFSVIEDDAFAGLSHLQYLFIEDNEIGSISKNALRGLRSLTHLSLANNHLETLPRFLFRGLDTLTHVDLRGNPFQCDCRVLWLLQWMPTVNASVGTGACAGPASLSHMQLHHLDPKTFKCPPTELSWFQTVGESALSVEPFSYQGEPHIVLAQPFAGRCLILSWDYSLQRFRPEEELPTAASVVSCKPLVLGPSLFVLAARLWGGSQLWARPSPGLRLAPTQTLAPRRLLRPNDAELLWLEGQPCFVVADASKAGSTTLLCRDGPGFYPHQSLHAWHRDTDAEALELDGRPHLLLASASQRPVLFHWTGGRFERRTDIPEAEDVYATRHFQAGGDVFLCLTRYIGDSMVMRWDGSMFRLLQQLPSRGAHVFQPLLIARDQLAILGSDFAFSQVLRLEPDKGLLEPLQELGPPALVAPRAFAHITMAGRRFLFAACFKGPTQIYQHHEIDLSA

SEQ ID NO: 821 - DNA, 1859 bp, Homo sapiens
  CDS (101)..(1759)
gtaactcctcttcatccactggggaggaaggtgaggcaggcgggcccaattcattcgcctccggtacttgcaagcctcgctcagtcttaagcaagaggggatggattcgcccgcagcactgagaatccaggggcaggcgggatggcgttcaggcgctgttgctagaaatctctgtctttactctgttttggtcattacggagggaagacagcccccaaagggaaagtgtcccctgcgctgctcctgctctaaagacagcgccctgtgtgagggctccccggacctgcccgtcagcttctctccgaccctgctgtcactctcactcgtcaggacgggagtcacccagctgaaggccggcagcttcctgagaattccgtctctgcacctgctcctcttcacctccaactccttctccgtgattgaggacgatgcatttgcgggcctgtcccacctgcagtacctcttcatcgaggacaatgagattggctccatctctaagaatgccctcagaggacttcgctcgcttacacacctaagcctggccaataaccatctggagaccctccccagattcctgttccgaggcctggacacccttactcatgtggacctccgcgggaacccgttccagtgtgactgccgcgtcctctggctcctgcagtggatgcccaccgtgaatgccagcgtggggaccggcgcctgtgcgggccccgcctccctgagccacatgcagctccaccacctcgaccccaagactttcaagtgcagagccatagagctgtcctggttccagacggtgggggagtcggcactgagcgtagagcccttctcctaccaaggggagcctcacattgtgctggcacagcccttcgccggccgctgcctgattctctcctgggactacagcctgcagcgcttccggcccgaggaagagctgcccgcggcctccgtggtgtcctgcaagccactggtgctgggcccgagcctcttcgtgctggctgcccgcctgtgggggggctcacagctgtgggcccggcccagtcccggcctgcgcctggccccaacgcagaccctggccccgcggcggctgctgcggcccaatgacgccgagctcctgtggctggaagggcaaccctgcttcgtggtggccgatgcctccaaggcgggcagcaccacgctgctgtgccgcgacgggcccggcttttacccgcaccagagcctgcacgcctggcaccgggacacggacgctgaggccctggagctggacggccggccccacctgctgctggcctcggcttcccagcggcccgtgctcttccactggaccggtggccgcttcgagagacgcacagacatcccgagggccgaggatgtctatgccacacgccacttccaggctggtggggacgtgttcctgtgcctcacacgctacattggggactccatggtcatgcgctgggacggctccatgtttcgtctgctgcagcaacttccctcgcgcggtgcccacgtcttccagccactgctcatcgccagggaccagctggccatcctaggcagcgacttcgccttcagccaggtcctccgccttgagcctgacaaggggctcctggagccactgcaggagctggggcctccggccctggtggccccccgtgcctttgcccacatcactatggccggcagacgcttcctctttgctgcttgctttaagggccccacacagatctaccagcatcacgagatcgacctcagtgcctgagaccaccaacgggactctgggcatggctggggcccctggacggccccttggctggctcctggccctacttggggtgatggcccgcctgtgagctgct

SEQ ID NO: 822 - protein, 553 aa, Homo sapiens
MDSPAALRIQGQAGWRSGAVARNLCLYSVLVITEGRQPPKGKCPLRCSCSKDSALCEGSPDLPVSFSPTLLSLSLVRTGVTQLKAGSFLRIPSLHLLLFTSNSFSVIEDDAFAGLSHLQYLFIEDNEIGSISKNALRGLRSLTHLSLANNHLETLPRFLFRGLDTLTHVDLRGNPFQCDCRVLWLLQWMPTVNASVGTGACAGPASLSHMQLHHLDPKTFKCRAIELSWFQTVGESALSVEPFSYQGEPHIVLAQPFAGRCLILSWDYSLQRFRPEEELPAASVVSCKPLVLGPSLFVLAARLWGGSQLWARPSPGLRLAPTQTLAPRRLLRPNDAELLWLEGQPCFVVADASKAGSTTLLCRDGPGFYPHQSLHAWHRDTDAEALELDGRPHLLLASASQRPVLFHWTGGRFERRTDIPRAEDVYATRHFQAGGDVFLCLTRYIGDSMVMRWDGSMFRLLQQLPSRGAHVFQPLLIARDQLAILGSDFAFSQVLRLEPDKGLLEPLQELGPPALVAPRAFAHITMAGRRFLFAACFKGPTQIYQHHEIDLSA

SEQ ID NO: 823 - DNA, 1482 bp, Homo sapiens
  CDS (1)..(1479)
tcccgagactttggaagttctcagctattactttattacataggatttctgtgtcttttctcatctcttttccttttggaaattggaagacccccaaagggaaagtgtcccctgcgctgctcctgctctaaagacagcgccctgtgtgagggctccccggacctgcccgtcagcttctctccgaccctgctgtcactgactgcccacatccccagctcactcgtcaggacgggagtcacccagctgaaggccggcagcttcctgagaattccgtctctgcacctgctgctcttcacctccaactccttctccgtgattgaggacgatgcatttgcgggcctgtcccacctgcagtacctgttcatcgaggacaatgagattggctccatctctaagaatgccctcagaggacttcgctcgcttacacacctgagcctggccaataaccatctggagaccctccccagattcctgttccgaggcctggacacccttactcatgtggacctccgcgggaacccgttccagtgtgactgccgcgtcctctggctcctgcagtggatgcccaccgtgaatgccagcgtggggaccggcgcctgtgcgggccccgcctccctgagccacatgcagctccaccacctcgaccccaagactttcaagtgcacagcggcctccgtggtgtcctgcaagccactggtgctgggcccgagcctcttcgtgctggctgcccgcctgtgggggggctcacagctgtgggcccggcccagtcccggcctgcgcctggccccaacgcagaccctggccccgcggcggctgctgcggcccaatgacgccgagctcctgtggctggaagggcaaccctgcttcgtggtggccgatgcctccaaggcgggcagcaccacgtgcagcgcttccggcccgaggaagagctgcccgagcctgcacgcctggcaccgggacacggacgctgaggccctggagctggacggccggccccacctgctgctggcctcggcttcccagcggcccgtgctcttccactggaccggtggccgcttcgagagacgcacggacatccccgaggccgaggatgtctatgccacacgccacttccaggctggtggggacgtgttcctgtgcctcacacgctacattggggactccatggtcatgcgctgggacggctccatgtttcgtctgctgcagcaacttccctcgcgcggtgcccacgtcttccagccactgctcatcgccagggaccaattggccatcctaggcagcgacttcgccttcagccaggtcctccgccttgagcctgacaaggggctcctggagccactgcaggagctggggcctctggccctggtggccccccgtgcctttgcccacatcactatggccggcagacgcttcctctttgctgcttgctttaagggccccacacagatctaccagcatcacgagatcgacctcagtgcctga

SEQ ID NO: 824 - protein, 493 aa, Homo sapiens
SRDFGSSQLLLYYIGFLCLFSSLFLLEIGRPPKGKCPLRCSCSKDSALCEGSPDLPVSFSPTLLSLTAHIPSSLVRTGVTQLKAGSFLRIPSLHLLLFTSNSFSVIEDDAFAGLSHLQYLFIEDNEIGSISKNALRGLRSLTHLSLANNHLETLPRFLFRGLDTLTHVDLRGNPFQCDCRVLWLLQWMPTVNASVGTGACAGPASLSHMQLHHLDPKTFKCTAASVVSCKPLVLGPSLFVLAARLWGGSQLWARPSPGLRLAPTQTLAPRRLLRPNDAELLWLEGQPCFVVADASKAGSTTCSASGPRKSCPSLHAWHRDTDAEALELDGRPHLLLASASQRPVLFHWTGGRFERRTDIPEAEDVYATRHFQAGGDVFLCLTRYIGDSMVMRWDGSMFRLLQQLPSRGAHVFQPLLIARDQLAILGSDFAFSQVLRLEPDKGLLEPLQELGPLALVAPRAFAHITMAGRRFLFAACFKGPTQIYQHHEIDLSA

SEQ ID NO: 825 - DNA, 741 bp, Homo sapiens
  CDS (1)..(741)
acggagggaagacagcccccaaagggaaagtgtcccctgcgctgctcctgctctaaagacagcgccctgtgtgagggctccccggacctgcccgtcagcttctctccgaccctgctgtcactctcactcgtcaggacgggagtcacccagctgaaggccggcagcttcctgagaattccgtctctgcacctgctcctcttcacctccaactccttctccgtgattgaggacgatgcatttgcgggcctgtcccacctgcagtacctcttcatcgaggacaatgagattggctccatctctaagaatgccctcagaggacttcgctcgcttacacacctaagcctggccaataaccatctggagaccctccccagattcctgttccgaggcctggacacccttactcacgtggacctccgcgggaacccgttccagtgtgactgccgcgtcctctggctcctgcagtggatgcccaccgtgaatgccagcgtggggaccggcgcctgtgcgggccccgcctccctgagccacatgcagctccaccacctcgaccccaagactttcaagtgcagagccatagagctgtcctggttccagacggtgggggagtcggcactgagcgtagagcccttctcctaccaaggggagcctcacattgtgctggcacagcccttcgccggccgctgcctgattctctcctgggactacagcctgcagcgcttccggcccgaggaagagctg

SEQ ID NO: 826 - protein, 247 aa, Homo sapiens
TEGRQPPKGKCPLRCSCSKDSALCEGSPDLPVSFSPTLLSLSLVRTGVTQLKAGSFLRIPSLHLLLFTSNSFSVIEDDAFAGLSHLQYLFIEDNEIGSISKNALRGLRSLTHLSLANNHLETLPRFLFRGLDTLTHVDLRGNPFQCDCRVLWLLQWMPTVNASVGTGACAGPASLSHMQLHHLDPKTFKCRAIELSWFQTVGESALSVEPFSYQGEPHIVLAQPFAGRCLILSWDYSLQRFRPEEEL

SEQ ID NO: 827 - DNA, 741 bp, Homo sapiens; identical to SEQ ID NO: 825
  CDS (1)..(741)

SEQ ID NO: 828 - protein, 247 aa, Homo sapiens; identical to SEQ ID NO: 826

SEQ ID NO: 829 - DNA, 741 bp, Homo sapiens; identical to SEQ ID NO: 825
  CDS (1)..(741)

SEQ ID NO: 830 - protein, 247 aa, Homo sapiens; identical to SEQ ID NO: 826

SEQ ID NO: 831 - DNA, 2106 bp, Homo sapiens
  CDS (1)..(1635)
tcccgagactttggaagttctcagctattactttattacataggatttctgtgtcttttctcatctcttttccttttggaaagacccccaaagggaaagtgtcccctgcgctgctcctgctctaaagacagcgccctgtgtgagggctccccggacctgcccgtcagcttctctccgaccctgctgtcactgtcactcgtcaggacgggagtcacccagctgaaggccggcagcttcctgagaattccgtctctgcacctgctgctcttcacctccaactccttctccgtgattgaggacgatgcatttgcgggcctgtcccacctgcagtacctgttcatcgaggacaatgagattggctccatctctaagaatgccctcagaggacttcgctcgcttacacacctgagcctggccaataaccatctggagaccctccccagattcctgttccgaggcctggacacccttactcatgtggacctccgcgggaacccgttccagtgtgactgccgcgtcctctggctcctgcagtggatgcccaccgtgaatgccagcgtggggaccggcgcctgtgcgggccccgcctccctgagccacatgcagctccaccacctcgaccccaagactttcaagtgcccacccacagagctgtcctggttccagacggtgggggagtcggcactgagcgtagagcccttctcctaccaaggggagcctcacattgtgctggcacagcccttcgccggccgctgcctgattctctcctgggactacagcctgcagcgcttccggcccgaggaagagctgcccacagcggcctccgtggtgtcctgcaagccactggtgctgggcccgagcctcttcgtgctggctgcccgcctgtgggggggctcacagctgtgggcccggcccagtcccggcctgcgcctggccccaacgcagaccctggccccgcggcggctgctgcggcccaatgacgccgagctcctgtggctggaagggcaaccctgcttcgtggtggccgatgcctccaaggcgggcagcaccacgctgctgtgccgcgacgggcccggcttttacccgcaccagagcctgcacgcctggcaccgggacacggacgctgaggccctggagctggacggccggccccacctgctgctggcctcggcttcccagcggcccgtgctcttccactggaccggtggccgcttcgagagacgcacggacatccccgaggccgaggatgtctatgccacacgtcacttccaggctggtggggacgtgttcctgtgcctcacacgctacattggggactccatggtgatgcgctgggacggctccatgtttcgtctgctgcagcaacttccctcgcgcggtgcccacgtcttccagccactgctcatcgccagggaccagttggccatcctaggcagcgacttcgccttcagccaggtcctccgccttgagcctgacaaggggctcctggagccactgcaggagctggggcctccggccctggtggccccccgtgcctttgcccacatcactatggccggcagacgcttcctctttgctgcttgctttaagggccccacacagatctaccagcatcacgagatcgacctcagtgcctgagaccaccaacgggactctgggcatggctggggcccctggacggccccttggctggctcctggccctacttggggtgatggtccgcctgtgagctgctgaccgtgggccacgttcatcagccacacgtctaggccttaagcccacttcttaaaggatctgcacccatggggggacatagagggtcccagcctactggacctcccgagctgcccttcaggtctaaagcaacatctggacatctcggctggggcagattccccatcaaaggcaacctggggggtgcaggctggtgcactgcatggagtcgaggtggaggtcacgtgcagagctccatgaggtcccggagcccccctctcaacccgctcctaccccgctggtccctctgaaagcaccgaggggttgatggcattcctttcccattctaaactccacgcagccaatcgctttcctggaggagcgccaacctcg

SEQ ID NO: 832 - protein, 545 aa, Homo sapiens; identical to SEQ ID NO: 820

SEQ ID NO: 833 - DNA, 2106 bp, Homo sapiens
  CDS (1)..(1635)
tcccgagactttggaagttctcagctattactttattacataggatttctgtgtcttttctcatctcttttccttttggaaagacccccaaagggaaagtgtcccctgcgctgctcctgctctaaagacagcgccctgtgtgagggctccccggacctgcccgtcagcttctctccgaccctgctgtcactgtcactcgtcaggacgggagtcacccagctgaaggccggcagcttcctgagaattccgtctctgcacctgctgctcttcacctccaactccttctccgtgattgaggacgatgcatttgcgggcctgtcccacctgcagtacctgttcatcgaggacaatgagattggctccatctctaagaatgccctcagaggacttcgctcgcttacacacctgagcctggccaataaccatctggagaccctccccagattcctgttccgaggcctggacacccttactcatgtggacctccgcgggaacccgttccagtgtgactgccgcgtcctctggctcctgcagtggatgcccaccgtgaatgccagcgtggggaccggcgcctgtgcgggccccgcctccctgagccacatgcagctccaccacctcgaccccaagactttcaagtgcccacccacagagctgtcctggttccagacggtgggggagtcggcactgagcgtagagcccttctcctaccaaggggagcctcacattgtgctggcacagcccttcgccggccgctgcctgattctctcctgggactacagcctgcagcgcttccggcccgaggaagagctgcccacagcggcctccgtggtgtcctgcaagccactggtgctgggcccgagcctcttcgtgctggctgcccgcctgtgggggggctcacagctgtgggcccggcccagtcccggcctgcgcctggccccaacgcagaccctggccccgcggcggctgctgcggcccaatgacgccgagctcctgtggctggaagggcaaccctgcttcgtggtggccgatgcctccaaggcgggcagcaccacgctgctgtgccgcgacgggcccggcttttacccgcaccagagcctgcacgcctggcaccgggacacggacgctgaggccctggagctggacggccggccccacctgctgctggcctcggcttcccagcggcccgtgctcttccactggaccggtggccgcttcgagagacgcacggacatccccgaggccgaggatgtctatgccacacgccacttccaggctggtggggacgtgttcctgtgcctcacacgctacattggggactccatggtgatgcgctgggacggctccatgtttcgtctgctgcagcaacttccctcgcgcggtgcccacgtcttccagccactgttcatcgccagggaccagttggccatcctaggcagcgacttcgccttcagccaggtcctccgccttgagcctgacaaggggctcctggagccactgcaggagctggggcctccggccctggtggccccccgtgcctttgcccacatcactatggccggcagacgcttcctctttgctgcttgctttaagggccccacacagatctaccagcatcacgagatcgacctcagtgcctgagaccaccaacgggactctgggcatggctggggcccctggacggccccttggctggctcctggccctacttggggtgatggtccgcctgtgagctgctgaccgtgggccacgttcatcagccacacgtctaggccttaagcccacttcttaaaggatctgcacccatggggggacatagagggtcccagcctactggacctcccgagctgcccttcaggtctaaagcaacatctggacatctcggctggggcagattccccatcaaaggcaacctggggggtgcaggctggtgcactgcatggagtcgaggtggaggtcacgtgcagagctccatgaggtcccggagcccccctctcaacccgctcctaccccgctggtccctctgaaagcaccgaggggttgatggcattcctttcccattctaaactccacgcagccaatcgctttcctggaggagcgccaacctcg

SEQ ID NO: 834 - protein, 545 aa, Homo sapiens
SRDFGSSQLLLYYIGFLCLFSSLFLLERPPKGKCPLRCSCSKDSALCEGSPDLPVSFSPTLLSLSLVRTGVTQLKAGSFLRIPSLHLLLFTSNSFSVIEDDAFAGLSHLQYLFIEDNEIGSISKNALRGLRSLTHLSLANNHLETLPRFLFRGLDTLTHVDLRGNPFQCDCRVLWLLQWMPTVNASVGTGACAGPASLSHMQLHHLDPKTFKCPPTELSWFQTVGESALSVEPFSYQGEPHIVLAQPFAGRCLILSWDYSLQRFRPEEELPTAASVVSCKPLVLGPSLFVLAARLWGGSQLWARPSPGLRLAPTQTLAPRRLLRPNDAELLWLEGQPCFVVADASKAGSTTLLCRDGPGFYPHQSLHAWHRDTDAEALELDGRPHLLLASASQRPVLFHWTGGRFERRTDIPEAEDVYATRHFQAGGDVFLCLTRYIGDSMVMRWDGSMFRLLQQLPSRGAHVFQPLFIARDQLAILGSDFAFSQVLRLEPDKGLLEPLQELGPPALVAPRAFAHITMAGRRFLFAACFKGPTQIYQHHEIDLSA

SEQ ID NO: 835 - DNA, 874 bp, Homo sapiens
  CDS (1)..(870)
atgaggatatttgctgtctttatattcatgacctactggcatttgctgaacgcatttactgtcacggttcccaaggacctatatgtggtagagtatggtagcaatatgacaattgaatgcaaattcccagtagaaaaacaattagacctggctgcactaattgtctattgggaaatggaggataagaacattattcaatttgtgcatggagaggaagacctgaaggttcagcatagtagctacagacagagggcccggctgttgaaggaccagctctccctgggaaatgctgcacttcagatcacagatgtgaaattgcaggatgcaggggtgtaccgctgcatgatcagctatggtggtgccgactacaagcgaattactgtgaaagtcaatgccccatacaacaaaatcaaccaaagaattttggttgtggatccagtcacctctgaacatgaactgacatgtcaggctgagggctaccccaaggccgaagtcatctggacaagcagtgaccatcaagtcctgagtggtaagaccaccaccaccaattccaagagagaggagaagcttttcaatgtgaccagcacactgagaatcaacacaacaactaatgagattttctactgcacttttaggagattagatcctgaggaaaaccatacagctgaattggtcatcccagaactacctctggcacatcctccaaatgaaaggactcacttggtaattctgggagccatcttattatgccttggtgtagcactgacattcatcttccgtttaagaaaagggagaatgatggatgtgaaaaaatgtggcatccaagatacaaactcaaagaagcaaagtgatacacatttggaggagacgtaaa

SEQ ID NO: 836 - protein, 290 aa, Homo sapiens
MRIFAVFIFMTYWHLLNAFTVTVPKDLYVVEYGSNMTIECKFPVEKQLDLAALIVYWEMEDKNIIQFVHGEEDLKVQHSSYRQRARLLKDQLSLGNAALQITDVKLQDAGVYRCMISYGGADYKRITVKVNAPYNKINQRILVVDPVTSEHELTCQAEGYPKAEVIWTSSDHQVLSGKTTTTNSKREEKLFNVTSTLRINTTTNEIFYCTFRRLDPEENHTAELVIPELPLAHPPNERTHLVILGAILLCLGVALTFIFRLRKGRMMDVKKCGIQDTNSKKQSDTHLEET

SEQ ID NO: 837 - DNA, 720 bp, Homo sapiens
  CDS (3)..(509)
tcatgacctactggcatttgctgaacgcatttactgtcacggttcccaaggacctatatgtggtagagtatggtagcaatatgacaattgaatgcaaattcccagtagaaaaacaattagacctggctgcactaattgtctattgggaaatggaggataagaacattattcaatttgtgcatggagaggaagacctgaaggttcagcatagtagctacagacagagggcccggctgttgaaggaccagctctccctgggaaatgctgcacttcagatcacagatgtgaaattgcaggatgcaggggtgtaccgctgcatgatcagctatggtggtgccgactacaagcgaattactgtgaaagtcaatgccccatacaacaaaatcaaccaaagaattttggttgtggatccagtcacctctgaacatgaactgacatgtcaggctgagggctaccccaaggccgaagtcatctggacaagcagtgaccatcaagtcctgagtggagattagatcctgaggaaaaccatacagctgaattggtcatcccagaactacctctggcacatcctccaaatgaaaggactcacttggtaattctgggagccatcttattatgccttggtgtagcactgacattcatcttccgtttaagaaaagggagaatgatggatgtgaaaaaatgtggcatccaagatacaaactcaaagaagcaaagtgg

SEQ ID NO: 838 - protein, 169 aa, Homo sapiens [sequence omitted]

SEQ ID NO: 839 - DNA, 900 bp, Homo sapiens
  CDS (2)..(886)
caccagatctcccaccatgaggatatttgctgtctttatattcatgacctactggcatttgctgaacgcatttactgtcacggttcccaaggacctatatgtggtagagtatggtagcaatatgacaattgaatgcaaattcccagtagaaaaacaattagacctggctgcactaattgtctattgggaaatggaggataagaacattattcaatttgtgcatggagaggaagacctgaaggttcagcatagtagctacagacagagggcccggctgttgaaggaccagctctccctgggaaatgctgcacttcagatcacagatgtgaaattgcaggatgcaggggtgtaccgctgcatgatcagctatggtggtgccgactacaagcgaattactgtgaaagtcaatgccccatacaacaaaatcaaccaaagaattttggttgtggatccagtcacctctgaacatgaactgacatgtcaggctgagggctaccccaaggccgaagtcatctggacaagcagtgaccatcaagtcctgagtggtaagaccaccaccaccaattccaagagagaggagaagcttttcaatgtgaccagcacactgagaatcaacacaacaactaatgagattttctactgcacttttaggagattagatcctgaggaaaaccatacagctgaattggtcatcccagaactacctctggcacatcctccaaatgaaaggactcacttggtaattctgggagccatcttattatgccttggtgtagcactgacattcatcttccgtttaagaaaagggagaatgatggatgtgaaaaaatgtggcatccaagatacaaactcaaagaagcaaagtgatacacatttggaggagacgtaaagtcgacggcc

SEQ ID NO: 840 - protein, 295 aa, Homo sapiens
TRSPTMRIFAVFIFMTYWHLLNAFTVTVPKDLYVVEYGSNMTIECKFPVEKQLDLAALIVYWEMEDKNIIQFVHGEEDLKVQHSSYRQRARLLKDQLSLGNAALQITDVKLQDAGVYRCMISYGGADYKRITVKVNAPYNKINQRILVVDPVTSEHELTCQAEGYPKAEVIWTSSDHQVLSGKTTTTNSKREEKLFNVTSTLRINTTTNEIFYCTFRRLDPEENHTAELVIPELPLAHPPNERTHLVILGAILLCLGVALTFIFRLRKGRMMDVKKCGIQDTNSKKQSDTHLEET

SEQ ID NO: 841 - DNA, 873 bp, Homo sapiens
  CDS (1)..(870)
atgaggatatttgctgtctttatattcatgacctactggcatttgctgaacgcatttactgtcacggttcccaaggacctatatgtggtagagtatggtagcaatatgacaattgaatgcaaattcccagtagaaaaacaattagacctggctgcactaattgtctattgggaaatggaggataagaacattattcaatttgtgcatggagaggaagacctgaaggttcagcatagtagctacagacagagggcccggctgttgaaggaccagctctccctgggaaatgctgcacttcagatcacagatgtgaaattgcaggatgcaggggtgtaccgctgcatgatcagctatggtggtgccgactacaagcgaattactgtgaaagtcaatgccccatacaacaaaatcaaccaaagaattttggttgtggatccagtcacctctgaacatgaactgacatgtcaggctgagggctaccccaaggccgaagtcatctggacaagcagtgaccatcaagtcctgagtggtaagaccaccaccaccaattccaagagagaggagaagcttttcaatgtgaccagcacactgagaatcaacacaacaactaatgagattttctactgcacttttaggagattagatcctgaggaaaaccatacagctgaattggtcatcccagaactacctctggcacatcctccaaatgaaaggactcacttggtaattctgggagccatcttattatgccttggtgtagcactgacattcatcttccgtttaagaaaagggagaatgatggatgtgaaaaaatgtggcatccaagatacaaactcaaagaagcaaagtgatacacatttggaggagacgtaa

SEQ ID NO: 842 - protein, 290 aa, Homo sapiens; identical to SEQ ID NO: 836

SEQ ID NO: 843 - DNA, 666 bp, Homo sapiens
  CDS (1)..(666)
tttactgtcacggttcccaaggacctatatgtggtagagtatggtagcaatatgacaattgaatgcaaattcccagtagaaaaacaattagacctggctgcactaattgtctattgggaaatggaggataagaacattattcaatttgtgcatggagaggaagacctgaaggttcagcatagtagctacagacagagggcccggctgttgaaggaccagctctccctgggaaatgctgcacttcagatcacagatgtgaaattgcaggatgcaggggtgtaccgctgcatgatcagctatggtggtgccgactacaagcgaattactgtgaaagtcaatgccccatacaacaaaatcaaccaaagaattttggttgtggatccagtcacctctgaacatgaactgacatgtcaggctgagggctaccccaaggccgaagtcatctggacaagcagtgaccatcaagtcctgagtggtaagaccaccaccaccaattccaagagagaggagaagcttttcaatgtgaccagcacactgagaatcaacacaacaactaatgagattttctactgcacttttaggagattagatcctgaggaaaaccatacagctgaattggtcatcccagaactacctctggcacatcctccaaatgaaaggactcac

SEQ ID NO: 844 - protein, 222 aa, Homo sapiens
FTVTVPKDLYVVEYGSNMTIECKFPVEKQLDLAALIVYWEMEDKNIIQFVHGEEDLKVQHSSYRQRARLLKDQLSLGNAALQITDVKLQDAGVYRCMISYGGADYKRITVKVNAPYNKINQRILVVDPVTSEHELTCQAEGYPKAEVIWTSSDHQVLSGKTTTTNSKREEKLFNVTSTLRINTTTNEIFYCTFRRLDPEENHTAELVIPELPLAHPPNERTH

SEQ ID NO: 845 - DNA, 745 bp, Homo sapiens
  CDS (1)..(534)
atgaggatatttgctgtctttatattcatgacctactggcatttgctgaacgcatttactgtcacggttcccaaggacctatatgtggtagagtatggtagcaatatgacaattgaatgcaaattcccagtagaaaaacaattagacctggctgcactaattgtctattgggaaatggaggataagaacattattcaatttgtgcatggagaggaagacctgaaggttcagcatagtagctacagacagagggcccggctgttgaaggaccagctctccctgggaaatgctgcacttcagatcacagatgtgaaattgcaggatgcaggggtgtaccgctgcatgatcagctatggtggtgccgactacaagcgaattactgtgaaagtcaatgccccatacaacaaaatcaaccaaagaattttggttgtggatccagtcacctctgaacatgaactgacatgtcaggctgagggctaccccaaggccgaagtcatctggacaagcagtgaccatcaagtcctgagtggagattagatcctgaggaaaaccatacagctgaattggtcatcccagaactacctctggcacatcctccaaatgaaaggactcacttggtaattctgggagccatcttattatgccttggtgtagcactgacattcatcttccgtttaagaaaagggagaatgatggatgtgaaaaaatgtggcatccaagatacaaactcaaagaagcaaagtgg

SEQ ID NO: 846 - protein, 178 aa, Homo sapiens
MRIFAVFIFMTYWHLLNAFTVTVPKDLYVVEYGSNMTIECKFPVEKQLDLAALIVYWEMEDKNIIQFVHGEEDLKVQHSSYRQRARLLKDQLSLGNAALQITDVKLQDAGVYRCMISYGGADYKRITVKVNAPYNKINQRILVVDPVTSEHELTCQAEGYPKAEVIWTSSDHQVLSGD

SEQ ID NO: 847 - DNA, 7184 bp, Homo sapiens
  CDS (62)..(931)
gcagcttcccgaggctccgcaccagccgcgcttctgtccgcctgcagggcattccagaaagatgaggatatttgctgtctttatattcatgacctactggcatttgctgaacgcatttactgtcacggttcccaaggacctatatgtggtagagtatggtagcaatatgacaattgaatgcaaattcccagtagaaaaacaattagacctggctgcactaattgtctattgggaaatggaggataagaacattattcaatttgtgcatggagaggaagacctgaaggttcagcatagtagctacagacagagggcccggctgttgaaggaccagctctccctgggaaatgctgcacttcagatcacagatgtgaaattgcaggatgcaggggtgtaccgctgcatgatcagctatggtggtgccgactacaagcgaattactgtgaaagtcaatgccccatacaacaaaatcaaccaaagaattttggttgtggatccagtcacctctgaacatgaactgacatgtcaggctgagggctaccccaaggccgaagtcatctggacaagcagtgaccatcaagtcctgagtggtaagaccaccaccaccaattccaagagagaggagaagcttttcaatgtgaccagcacactgagaatcaacacaacaactaatgagattttctactgcacttttaggagattagatcctgaggaaaaccatacagctgaattggtcatcccagaactacctctggcacatcctccaaatgaaaggactcacttggtaattctgggagccatcttattatgccttggtgtagcactgacattcatcttccgtttaagaaaagggagaatgatggatgtgaaaaaatgtggcatccaagatacaaactcaaagaagcaaagtgatacacatttggaggagacgtaatccagcattggaacttctgatcttcaagcagggattctcaacctgtggtttaggggttcatcggggctgagcgtgacaagaggaaggaatgggcccgtgggatgcaggcaatgtgggacttaaaaggcccaagcactgaaaatggaacctggcgaaagcagaggaggagaatgaagaaagatggagtcaaacagggagcctggagggagaccttgatactttcaaatgcctgaggggctcatcgacgcctgtgacagggagaaaggatacttctgaacaaggagcctccaagcaaatcatccattgctcatcctaggaagacgggttgagaatccctaatttgagggtcagttcctgcagaagtgccctttgcctccactcaatgcctcaatttgttttctgcatgactgagagtctcagtgttggaacgggacagtatttatgtatgagtttttcctatttattttgagtctgtgaggtcttcttgtcatgtgagtgtggttgtgaatgatttcttttgaagatatattgtagtagatgttacaattttgtcgccaaactaaacttgctgcttaatgatttgctcacatctagtaaaacatggagtatttgtaaggtgcttggtctcctctataactacaagtatacattggaagcataaagatcaaaccgttggttgcataggatgtcacctttatttaacccattaatactctggttgacctaatcttattctcagacctcaagtgtctgtgcagtatctgttccatttaaatatcagctttacaattatgtggtagcctacacacataatctcatttcatcgctgtaaccaccctgttgtgataaccactattattttacccatcgtacagctgaggaagcaaacagattaagtaacttgcccaaaccagtaaatagcagacctcagactgccacccactgtccttttataatacaatttacagctatattttactttaagcaattcttttattcaaaaaccatttattaagtgcccttgcaatatcaatcgctgtgccaggcattgaatctacagatgtgagcaagacaaagtacctgtcctcaaggagctcatagtataatgaggagattaacaagaaaatgtattattacaatttagtccagtgtcatagcataaggatgatgcgaggggaaaacccgagcagtgttgccaagaggaggaaataggccaatgtggtctgggacggttggatatacttaaacatcttaataatcagagtaattttcatttacaaagagaggtcggtacttaaaataaccctgaaaaataacactggaattccttttctagcattatatttattcctgatttgcctttgccatataatctaatgcttgtttatatagtgtctggtattgtttaacagttctgtcttttctatttaaatgccactaaattttaaattcatacctttccatgattcaaaattcaaaagatcccatgggagatggttggaaaatctccacttcatcctccaagccattcaagtttcctttccagaagcaactgctactgcctttcattcatatgttcttctaaagatagtctacatttggaaatgtatgttaaaagcacgtatttttaaaatttttttcctaaatagtaacacattgtatgtctgctgtgtactttgctatttttatttattttagtgtttcttatatagcagatggaatgaatttgaagttcccagggctgaggatccatgccttctttgtttctaagttatctttcccatagcttttcattatctttcatatgatccagtatatgttaaatatgtcctacatatacatttagacaaccaccatttgttaagtatttgctctaggacagagtttggatttgtttatgtttgctcaaaaggagacccatgggctctccagggtgcactgagtcaatctagtcctaaaaagcaatcttattattaactctgtatgacagaatcatgtctggaacttttgttttctgctttctgtcaagtataaacttcactttgatgctgtacttgcaaaatcacattttctttctggaaattccggcagtgtaccttgactgctagctaccctgtgccagaaaagcctcattcgttgtgcttgaacccttgaatgccaccagctgtcatcactacacagccctcctaagaggcttcctggaggtttcgagattcagatgccctgggagatcccagagtttcctttccctcttggccatattctggtgtcaatgacaaggagtaccttggctttgccacatgtcaaggctgaagaaacagtgtctccaacagagctccttgtgttatctgtttgtacatgtgcatttgtacagtaattggtgtgacagtgttctttgtgtgaattacaggcaagaattgtggctgagcaaggcacatagtctactcagtctattcctaagtcctaactcctccttgtggtgttggatttgtaaggcactttatcccttttgtctcatgtttcatcgtaaatggcataggcagagatgatacctaattctgcatttgattgtcactttttgtacctgcattaatttaataaaatattcttatttattttgttacttggtaaaaaaaaaaaaaaagcttcccgaggctccgcaccagccgcgcttctgtccgcctgcagggcattccagaaagatgaggatatttgctgtctttatattcatgacctactggcatttgctgaacgcatttactgtcacggttcccaaggacctatatgtggtagagtatggtagcaatatgacaattgaatgcaaattcccagtagaaaaacaattagacctggctgcactaattgtctattgggaaatggaggataagaacattattcaatttgtgcatggagaggaagacctgaaggttcagcatagtagctacagacagagggcccggctgttgaaggaccagctctccctgggaaatgctgcacttcagatcacagatgtgaaattgcaggatgcaggggtgtaccgctgcatgatcagctatggtggtgccgactacaagcgaattactgtgaaagtcaatgccccatacaacaaaatcaaccaaagaattttggttgtggatccagtcacctctgaacatgaactgacatgtcaggctgagggctaccccaaggccgaagtcatctggacaagcagtgaccatcaagtcctgagtggtaagaccaccaccaccaattccaagagagaggagaagcttttcaatgtgaccagcacactgagaatcaacacaacaactaatgagattttctactgcacttttaggagattagatcctgaggaaaaccatacagctgaattggtcatcccagaactacctctggcacatcctccaaatgaaaggactcacttggtaattctgggagccatcttattatgccttggtgtagcactgacattcatcttccgtttaagaaaagggagaatgatggatgtgaaaaaatgtggcatccaagatacaaactcaaagaagcaaagtgatacacatttggaggagacgtaatccagcattggaacttctgatcttcaagcagggattctcaacctgtggtttaggggttcatcggggctgagcgtgacaagaggaaggaatggacccgtgggatgcaggcaatgtgggacttaaaaggcccaagcactgaaaatggaacctggcgaaagcagaggaggagaatgaagaaagatggagtcaaacagggagcctggagggagaccttgatactttcaaatgcctgaggggctcatcgacgcctgtgacagggagaaaggatacttctgaacaaggagcctccaagcaaatcatccattgctcatcctaggaagacgggttgagaatccctaatttgagggtcagttcctgcagaagtgccctttgcctccactcaatgcctcaatttgttttctgcatgactgagagtctcagtgttggaacgggacagtatttatgtatgagtttttcctatttattttgagtctgtgaggtcttcttgtcatgtgagtgtggttgtgaatgatttcttttgaagatatattgtagtagatgttacaattttgtcgccaaactaaacttgctgcttaatgatttgctcacatctagtaaaacatggagtatttgtaaggtgcttggtctcctctataactacaagtatacattggaagcataaagatcaaaccgttggttgcataggatgtcacctttatttaacccattaatactctggttgacctaatcttattctcagacctcaagtgtctgtgcagtatctgttccatttaaatatcagctttacaattatgtggtagcctacacacataatctcatttcatcgctgtaaccaccctgttgtgataaccactattattttacccatcgtacagctgaggaagcaaacagattaagtaacttgcccaaaccagtaaatagcagacctcagactgccacccactgtccttttataatacaatttacagctatattttactttaagcaattcttttattcaaaaaccatttattaagtgcccttgcaatatcaatcgctgtgccaggcattgaatctacagatgtgagcaagacaaagtacctgtcctcaaggagctcatagtataatgaggagattaacaagaaaatgtattattacaatttagtccagtgtcatagcataaggatgatgcgaggggaaaacccgagcagtgttgccaagaggaggaaataggccaatgtggtctgggacggttggatatacttaaacatcttaataatcagagtaattttcatttacaaagagaggtcggtacttaaaataaccctgaaaaataacactggaattccttttctagcattatatttattcctgatttgcctttgccatataatctaatgcttgtttatatagtgtctggtattgtttaacagttctgtcttttctatttaaatgccactaaattttaaattcatacctttccatgattcaaaattcaaaagatcccatgggagatggttggaaaatctccacttcatcctccaagccattcaagtttcctttccagaagcaactgctactgcctttcattcatatgttcttctaaagatagtctacatttggaaatgtatgttaaaagcacgtatttttaaaatttttttcctaaatagtaacacattgtatgtctgctgtgtactttgctatttttatttattttagtgtttcttatatagcagatggaatgaatttgaagttcccagggctgaggatccatgccttctttgtttctaagttatctttcccatagcttttcattatctttcatatgatccagtatatgttaaatatgtcctacatatacatttagacaaccaccatttgttaagtatttgctctaggacagagtttggatttgtttatgtttgctcaaaaggagacccatgggctctccagggtgcactgagtcaatctagtcctaaaaagcaatcttattattaactctgtatgacagaatcatgtctggaacttttgttttctgctttctgtcaagtataaacttcactttgatgctgtacttgcaaaatcacattttctttctggaaattccggcagtgtaccttgactgctagctaccctgtgccagaaaagcctcattcgttgtgcttgaacccttgaatgccaccagctgtcatcactacacagccctcctaagaggcttcctggaggtttcgagattcagatgccctgggagatcccagagtttcctttccctcttggccatattctggtgtcaatgacaaggagtaccttggctttgccacatgtcaaggctgaagaaacagtgtctccaacagagctccttgtgttatctgtttgtacatgtgcatttgtacagtaattggtgtgacagtgttctttgtgtgaattacaggcaagaattgtggctgagcaaggcacatagtctactcagtctattcctaagtcctaactcctccttgtggtgttggatttgtaaggcactttatcccttttgtctcatgtttcatcgtaaatggcataggcagagatgatacctaattctgcatttgattgtcactttttgtacctgcattaatttaataaaatattcttatttattttgttacttggtacaccagcatgtccattttcttgtttattttgtgtttaataaaatg

SEQ ID NO: 848 - protein, 290 aa, Homo sapiens; identical to SEQ ID NO: 836

SEQ ID NO: 849 - DNA, 900 bp, Homo sapiens; identical to SEQ ID NO: 839
  CDS (17)..(865)

SEQ ID NO: 850 - protein, 283 aa, Homo sapiens
MRIFAVFIFMTYWHLLNAFTVTVPKDLYVVEYGSNMTIECKFPVEKQLDLAALIVYWEMEDKNIIQFVHGEEDLKVQHSSYRQRARLLKDQLSLGNAALQITDVKLQDAGVYRCMISYGGADYKRITVKVNAPYNKINQRILVVDPVTSEHELTCQAEGYPKAEVIWTSSDHQVLSGKTTTTNSKREEKLFNVTSTLRINTTTNEIFYCTFRRLDPEENHTAELVIPELPLAHPPNERTHLVILGAILLCLGVALTFIFRLRKGRMMDVKKCGIQDTNSKKQS

SEQ ID NO: 851 - DNA, 2715 bp, Homo sapiens
  CDS (34)..(2565)
tgcctgcactgcaagtgtccccaggaggagcacatggtgacagtgatgccgctggagatggagaagaccatcagcaaactcatgtttgactttcagaggaactcgacctcagatgatgactcaggctgtgctttggaagagtatgcctgggtcccgccgggtctgaagcctgaacaggtacaccagtactatagctgtctcccagaagagaaagtcccttatgtcaacagtcctggagagaaactgcgaatcaagcagctactacaccagctgccgccacatgacaatgaggtaaggtattgcaactccctggatgaggaagagaagagggagctgaagcttttcagcagccagaggaaacgcgaaaacttgggccgcgggaatgtcaggcctttcccagtcaccatgacaggagctatttgtgaacagtgcggaggccagatcaatggtggagacatcgctgtgtttgcgtcacgcgctggccacggcgtttgctggcacccgccgtgcttcgtatgcactgtctgcaatgagctcctggtggatctgatctacttttaccaagatgggaagatatactgtggcaggcaccatgctgagtgcctgaagccgcgctgtgctgcctgcgatgagatcatctttgcagatgaatgcacagaagctgaggggcgacactggcacatgaaacacttttgctgcttcgagtgtgagacagtgctgggcggccagcgctacatcatgaaggagggaagaccctactgttgccactgcttcgagtccttgtatgcagaatattgtgacacctgtgcccaacatataggtatcgaccaaggtcaaatgacctatgatggccaacactggcatgccactgagacctgtttctgctgtgctcactgcaagaaatccctcctggggcggccattcctcccgaagcagggccagatattctgctcacgggcctgcagtgctggggaagaccccaatggttctgactcctctgattccgccttccagaacgccagggccaaggagtcccggcgcagtgccaaaattggcaagaacaagggcaagacggaggagcccatgctgaaccagcacagccagctgcaagtgagttctaaccggctgtcagccgacgtagaccccctgtcactgcagatggacatgctcagcctgtccagccagacacccagcctcaaccgggaccccatctggaggagccgggaagagccctaccattatgggaacaagatggagcagaaccagacccagagccctctgcagctcctcagccagtgcaacatcagaacttcctacagtccaggagggcaaggggctggggcccagcccgaaatgtggggcaagcacttcagcaaccccaaaaggagctcgtcactggccatgacaggacatgctggcagcttcatcaaggaatgccgagaagactattacccggggaggctgagatctcaggagagctacagtgatatgtctagtcagagtttcagtgagacccgaggcagcatccaagtccccaaatatgaggaggaagaggaagaggaagggggcttgtccactcagcagtgtcggacccgtcatcccatcagttccctgaaatacacagaggacatgacgcccacagagcagacccctcggggctccatggaatccctggccctgtctaatgcaacaggtctctctgctgatggtggtgccaagcgccaggagcacctatcccgattttccatgcctgacctcagcaaagactctggaatgaatgtgtctgagaagctgagcaacatgggcactcttaactcgtccatgcagttccggagcgcagagtcagttcgcagcctgctctctgcccagcagtaccaggagatggagggaaacctccaccagctcagcaaccccattggctacagagacctgcagtcccacggaaggatgcatcagagctttgattttgatggagggatggcgggcagcaagctgccagggcaggagggcgtgaggatccagcccatgagtgaacgcacccggagaagagctacttcacgcgacgacaaccgccgtttccgacctcacaggtccaggcgttcccgacgctctcgctccgacaacgccctccacctggccagcgaacgcgaggccatctcccggttaaaagataggccccctctgagagccagggaggactatgaccaatttatgcgccagcggagcttccaggagagcatggggcatgggtcccggagggacctgtacggccagtgccctaggactgtgtcggacctggctttgcagaatgcctttggggaccgctggggaccctacttcgccgagtatgattggtgttccacctgctcctcctcttcagagtctgacaacgagggctatttcctaggagaacccatcccccagccagcgcgcctgcgatacgtcacaagcgatgagctgctgcacaaatacagctcctacggcctccccaaatcttccacattaggtggcagaggacagttgcacagcaggaaaagacagaagagcaaaaactgtatcatttcttaatatgattgggatcagggaatgggagaagatgggagctaagaatgtaaagtcagaaacttgcactgttttaaatgttaaagcgcttttgggggtggcttatgggggagaaaagggaaaatgctgtcagtagatggaggcaaggttaca

SEQ ID NO: 852 - protein, 844 aa, Homo sapiens
MVTVMPLEMEKTISKLMFDFQRNSTSDDDSGCALEEYAWVPPGLKPEQVHQYYSCLPEEKVPYVNSPGEKLRIKQLLHQLPPHDNEVRYCNSLDEEEKRELKLFSSQRKRENLGRGNVRPFPVTMTGAICEQCGGQINGGDIAVFASRAGHGVCWHPPCFVCTVCNELLVDLIYFYQDGKIYCGRHHAECLKPRCAACDEIIFADECTEAEGRHWHMKHFCCFECETVLGGQRYIMKEGRPYCCHCFESLYAEYCDTCAQHIGIDQGQMTYDGQHWHATETCFCCAHCKKSLLGRPFLPKQGQIFCSRACSAGEDPNGSDSSDSAFQNARAKESRRSAKIGKNKGKTEEPMLNQHSQLQVSSNRLSADVDPLSLQMDMLSLSSQTPSLNRDPIWRSREEPYHYGNKMEQNQTQSPLQLLSQCNIRTSYSPGGQGAGAQPEMWGKHFSNPKRSSSLAMTGHAGSFIKECREDYYPGRLRSQESYSDMSSQSFSETRGSIQVPKYEEEEEEEGGLSTQQCRTRHPISSLKYTEDMTPTEQTPRGSMESLALSNATGLSADGGAKRQEHLSRFSMPDLSKDSGMNVSEKLSNMGTLNSSMQFRSAESVRSLLSAQQYQEMEGNLHQLSNPIGYRDLQSHGRMHQSFDFDGGMAGSKLPGQEGVRIQPMSERTRRRATSRDDNRRFRPHRSRRSRRSRSDNALHLASEREAISRLKDRPPLRAREDYDQFMRQRSFQESMGHGSRRDLYGQCPRTVSDLALQNAFGDRWGPYFAEYDWCSTCSSSSESDNEGYFLGEPIPQPARLRYVTSDELLHKYSSYGLPKSSTLGGRGQLHSRKRQKSKNCIIS

SEQ ID NO: 853 - DNA, 1190 bp, Homo sapiens
  CDS (54)..(1013)
ttattgacagtttatcctgccgcacctggaatcctgagacaaaccaaggtgctatgtgtttcacgtcccagtgcagagctctgagcagctcatcagcctctccaatgtctctcatttttttaggtatcgaccaaggtcaaatgacctatgacggccaacactggcatgccactgagacctgtttctgctgtgctcactgcaagaaatccctcctggggcggccattcctcccgaagcagggccagatattctgctcacgggcctgcagtgctggggaagaccccaatggttctgactcctctgattccgccttccagaacgccagggccaaggagtcccggcgcagtgccaaaattggcaagaacaagggcaagacggaggagcccatgctgaaccagcacagccagctgcaagtgagttctaaccggctgtcagccgacgtagaccccctgtcactgcagatggacatgctcagcctgtccagccagacacccagcctcaaccgggaccccatctggaggagccgggaagagccctaccattatgggaacaagatggagcagaaccagacccagagccctctgcagctcctcagccagtgcaacatcagaacttcctacagtccaggagggcaaggggctggggcccagcccgaaatgtggggcaagcacttcagcaaccccaaaaggagcacgtcactggccatgacaggacatgctggcagcttcatcaaggaatgccgagaagactattacccggggaggctgagatctcaggagagctacagtgatatgtctagtcagagtttcagtgagacccgaggcagcatccaagtccccaaatatgaggaggaagaggaagaggaagggggcttgtccactcagcagtgtcggacccgtcatcccatcagttccctgaaatacacagaggacatgacgcccacagagcagacccctcggggctccatggaatccctggccctgtctaatgcaacaggtaggttctgttcaccttgaaaacagatagaaagggggtagtctctgggtgactggatgctggtccccaggaattttttttttttgaaatggagtctcgctctgtcccccaggctggagtgcagtggcacgatctccgctcactgcaagctccacctcccgggttcacgccattctcctgcctcagcctcacga

SEQ ID NO: 854 - protein, 320 aa, Homo sapiens
MCFTSQCRALSSSSASPMSLIFLGIDQGQMTYDGQHWHATETCFCCAHCKKSLLGRPFLPKQGQIFCSRACSAGEDPNGSDSSDSAFQNARAKESRRSAKIGKNKGKTEEPMLNQHSQLQVSSNRLSADVDPLSLQMDMLSLSSQTPSLNRDPIWRSREEPYHYGNKMEQNQTQSPLQLLSQCNIRTSYSPGGQGAGAQPEMWGKHFSNPKRSTSLAMTGHAGSFIKECREDYYPGRLRSQESYSDMSSQSFSETRGSIQVPKYEEEEEEEGGLSTQQCRTRHPISSLKYTEDMTPTEQTPRGSMESLALSNATGRFCSP

SEQ ID NO: 855 - DNA, 2715 bp, Homo sapiens
  CDS (34)..(2565)
tgcctgcactgcaagtgtccccaggaggagcacatggtgacagtgatgccgctggagatggagaagaccatcagcaaactcatgtttgactttcagaggaactcgacctcagatgatgactcaggctgtgctttggaagagtatgcctgggtcccgccgggtctgaagcctgaacaggtacaccagtactatagctgtctcccagaagagaaagtcccttatgtcaacagtcctggagagaaactgcgaatcaagcagctactacaccagctgccgccacatgacaatgaggtaaggtattgcaactccctggatgaggaagagaagagggagctgaagcttttcagcagccagaggaaacgcgaaaacttgggccgcgggaatgtcaggcctttcccagtcaccatgacaggagctatttgtgaacagtgcggaggccagatcaatggtggagacatcgctgtgtttgcgtcacgcgctggccacggcgtttgctggcacccgccgtgcttcgtatgcactgtctgcaatgagctcctggtggatctgatctacttttaccaagatgggaagatatactgtggcaggcaccatgctgagtgcctgaagccgcgctgtgctgcctgcgatgagatcatctttgcagatgaatgcacagaagctgaggggcgacactggcacatgaaacacttttgctgcttcgagtgtgagacagtgctgggcggccagcgctacatcatgaaggagggaagaccctactgttgccactgcttcgagtccttgtatgcagaatattgtgacacctgtgcccaacatataggtatcgaccaaggtcaaatgacctatgatggccaacactggcatgccactgagacctgtttctgctgtgctcactgcaagaaatccctcctggggcggccattcctcccgaagcagggccagatattctgctcacgggcctgcagtgctggggaagaccccaatggttttgactcctctgattccgccttccagaacgccagggccaaggagtcccggcgcagtgccaaaattggcaagaacaagggcaagacggaggagcccatgctgaaccagcacagccagctgcaagtgagttctaaccggctgtcagccgacgtagaccccctgtcactgcagatggacatgctcagcctgtccagccagacacccagcctcaaccgggaccccatctggaggagccgggaagagccctaccattatgggaacaagatggagcagaaccagacccagagccctctgcagctcctcagccagtgcaacatcagaacttcctacagtccaggagggcaaggggctggggcccagcccgaaatgtggggcaagcacttcagcaaccccaaaaggagctcgtcactggccatgacaggacatgctggcagcttcatcaaggaatgccgagaagactattacccggggaggctgagatctcaggagagctacagtgatatgtctagtcagagtttcagtgagacccgaggcagcatccaagtccccaaatatgaggaggaagaggaagaggaagggggcttgtccactcagcagtgtcggacccgtcatcccatcagttccctgaaatacacagaggacatgacgcccacagagcagacccctcggggctccatggaatccctggccctgtctaatgcaacaggtctctctgctgatggtggtgccaagcgccaggagcacctatcccgattttccatgcctgacctcagcaaagactctggaatgaatgtgtctgagaagctgagcaacatgggcactcttaactcgtccatgcagttccggagcgcagagtcagttcgcagcctgctctctgcccagcagtaccaggagatggagggaaacctccaccagctcagcaaccccattggctacagagacctgcagtcccacggaaggatgcatcagagctttgattttgatggagggatggcgggcagcaagctgccagggcaggagggcgtgaggatccagcccatgagtgaacgcacccggagaagagctacttcacgcgacgacaaccgccgtttccgacctcacaggtccaggcgttcccgacgctctcgctccgacaacgccctccacctggccagcgaacgcgaggccatctcccggttaaaagataggccccctctgagagccagggaggactatgaccaatttatgcgccagcggagcttccaggagagcatggggcatgggtcccggagggacctgtacggccagtgccctaggactgtgtcggacctggctttgcagaatgcctttggggaccgctggggaccctacttcgccgagtatgattggtgttccacctgctcctcctcttcagagtctgacaacgagggctatttcctaggagaacccatcccccagccagcgcgcctgcgatacgtcacaagcgatgagctgctgcacaaatacagctcctacggcctccccaaatcttccacattaggtggcagaggacagttgcacagcaggaaaagacagaagagcaaaaactgtatcatttcttaatatgattgggatcagggaatgggagaagatgggagctaagaatgtaaagtcagaaacttgcactgttttaaatgttaaagcgcttttgggggtggcttatgggggagaaaagggaaaatgctgtcagtagatggaggcaaggttaca

SEQ ID NO: 856 - protein, 844 aa, Homo sapiens
MVTVMPLEMEKTISKLMFDFQRNSTSDDDSGCALEEYAWVPPGLKPEQVHQYYSCLPEEKVPYVNSPGEKLRIKQLLHQLPPHDNEVRYCNSLDEEEKRELKLFSSQRKRENLGRGNVRPFPVTMTGAICEQCGGQINGGDIAVFASRAGHGVCWHPPCFVCTVCNELLVDLIYFYQDGKIYCGRHHAECLKPRCAACDEIIFADECTEAEGRHWHMKHFCCFECETVLGGQRYIMKEGRPYCCHCFESLYAEYCDTCAQHIGIDQGQMTYDGQHWHATETCFCCAHCKKSLLGRPFLPKQGQIFCSRACSAGEDPNGFDSSDSAFQNARAKESRRSAKIGKNKGKTEEPMLNQHSQLQVSSNRLSADVDPLSLQMDMLSLSSQTPSLNRDPIWRSREEPYHYGNKMEQNQTQSPLQLLSQCNIRTSYSPGGQGAGAQPEMWGKHFSNPKRSSSLAMTGHAGSFIKECREDYYPGRLRSQESYSDMSSQSFSETRGSIQVPKYEEEEEEEGGLSTQQCRTRHPISSLKYTEDMTPTEQTPRGSMESLALSNATGLSADGGAKRQEHLSRFSMPDLSKDSGMNVSEKLSNMGTLNSSMQFRSAESVRSLLSAQQYQEMEGNLHQLSNPIGYRDLQSHGRMHQSFDFDGGMAGSKLPGQEGVRIQPMSERTRRRATSRDDNRRFRPHRSRRSRRSRSDNALHLASEREAISRLKDRPPLRAREDYDQFMRQRSFQESMGHGSRRDLYGQCPRTVSDLALQNAFGDRWGPYFAEYDWCSTCSSSSESDNEGYFLGEPIPQPARLRYVTSDELLHKYSSYGLPKSSTLGGRGQLHSRKRQKSKNCIIS

SEQ ID NO: 857 - DNA, 877 bp, Homo sapiens
  CDS (25)..(534)
ccggagctgcctgtgatgccgtgaatggctcctgcctctgccccgctggccgccggggcccccgctgtgccgagacctgccctgccggcctgtacggcgacaactgtcggcattcctgcctctgccagaacggagggacctgtgaccctgtctcaggcctgcgagcacccctgtccccctggcttccacggggctggccgccaggggttgtgctggtgtcaacatggagccccctgcgaccccatcagtggccgatgcctctgccctgccggcttccacggccacttctgtgagagggattgcagaaggggccagtttgggcccagctgcaccctgcactgtgactgcgggggtggggctgactgcgaccctgtcagtgggcagtgtcactgtgtggatggctacatggggcccacgtgccgggaaggtgggcccctccggctccccgagaacccgtccttagcccagggctcagcgggcacactgcccgcctccagcagacccacatcccggagcggtggaccagcgaggcactagtagaggcagtcccgtggagcccgcctctccagtcccagccagaggggaccctggcctttggtgaccactgagaaggacacttcacgggcccagagctcctggtactgcccttcctttgagggccgtggagggctgtggacagcccagcaacctgtcgctcttggaggctggtgtggccttgaggagggaagcctcgcatggccgctggaagagaggcgtctcctggcctggctctgcagaacccaggggcacgctctgggcctgggctgaggaagtcccgctctcccgcggctctgagttggactgaggacaggtgtgggcgccagtgtgggtgcaggcg

SEQ ID NO: 858 - protein, 170 aa, Homo sapiens
MAPASAPLAAGAPAVPRPALPACTATTVGIPASARTEGPVTLSQACEHPCPPGFHGAGRQGLCWCQHGAPCDPISGRCLCPAGFHGHFCERDCRRGQFGPSCTLHCDCGGGADCDPVSGQCHCVDGYMGPTCREGGPLRLPENPSLAQGSAGTLPASSRPTSRSGGPARH

SEQ ID NO: 859 - DNA, 5172 bp, Homo sapiens
  CDS (16)..(4797)
gcaccggcgcgcacgatgtcgttccttgaagaggcgagggcagcggggcgcgcggtggtcctggcgttggtgctgctgctgctccccgccgtgcccgtgggcgccagcgttccgccgcggcccctgctcccgctgcagcccggcatgccccacgtgtgtgctgagcaggagctgaccctggtgggccgccgccagccgtgcgtgcaggccttaagccacacggtgccggtgtggagggccggctgtgggtggcaggcgtggtgcgtgggtcatgagcggagaaccgtctactacatgggctacaggcaggtgtataccacggaggcccggaccgtgctcaggtgctgccgagggtggacgcagcagcccgacgaggagggctgcctctcggctgaatgcagcgccagcctctgttttcacggtggccgttgtgtgccaggctcagcccagccgtgtcactgtccccccggcttccagggaccccgctgtcagtatgatgtggacgaatgccgaacccacaacggtggctgccagcaccggtgcgtgaacaccccaggctcctacctctgtgagtgcaagcccggcttccggctccacactgacagcaggacctgcctggccattaactcctgcgccctgggcaatggcggctgccagcaccactgtgtccagctcacaatcactcggcatcgctgccagtgccggcccgggttccagctccaggaggacggcaggcattgtgtccgtagaagcccgtgtgccaacaggaacggcagctgcatgcacaggtgccaggtggtccggggcctcgcccgctgtgagtgccacgtgggctatcagctagcagcggacggcaaggcctgtgaagatgtggacgaatgtgccgcagggctggcccagtgtgcccatggctgcctcaacacccaggggtccttcaagtgcgtgtgtcacgcgggctatgagctgggcgccgatggccggcagtgctaccgtattgagatggaaatcgtgaacagctgtgaggccaacaacggcggctgctcccatggctgcagccacaccagtgctgggcccctgtgcacctgtccccgcggctacgagctggacacagatcagaggacctgcatcagatgtcgacgactgtgcagacagcccgtgctgcagcaggtgtgcaccaacaaccctggcgggtacgagtgcggctgctacgccggctaccggctcagtgccgatggctgcggctgcgaggatgtggatgagtgcgcctccagccgtggcggctgcgagcaccactgcaccaacctggccggctccttccagtgctcctgcgaggccggctaccggctgcacgaggaccgtaggggctgcagcgccctggaggagccgatggtggacctggacggcgagctgcctttcgtgcggcccctgccccacattgccgtgctccaggacgagctgccgcaactcttccaggatgacgacgtcggggccgatgaggaagaggcagagttgcggggcgaacacacgctcacagagaagtttgtctgcctggatgactcctttggccatgactgcagcttgacctgtgatgactgcaggaacggagggacctgcctcctgggcctggatggctgtgattgccccgagggctggactgggctcatctgcaatgagagttgtcctccggacacctttgggaagaactgcagcttctcctgcagctgtcagaatggtgggacctgcgactctgtcacgggggcctgccgctgccccccgggtgtcagtggaactaactgtgaggatggctgccccaagggctactatggcaagcactgtcgcaagaaatgcaactgtgccaaccggggccggtgccaccgcctctacggggcctgcctctgcgacccagggctctacggccgcttctgccacctcgcctgcccgccgtgggcctttgggccgggctgctcggaggagtgccagtgtgtgcagccccacacgcagtcctgtgacaagagggatggcagctgctcctgcaaggctggcttccggggcgagcgctgtcaggcagagtgtgagccgggctactttgggccggggtgctggcaggcatgcacctgcccagtgggcgtggcctgtgactccgtgagcggcgagtgtgggaagcggtgtcctgctggcttccagggagaggactgtggccaagagtgcccggtggggacctttggcgtgaactgctcgagctcctgctcctgtgggggggccccctgccacggggtcacggggcagtgccggtgtccgccggggaggactggggaagactgtgaggcaggtgagtgtgagggcctctgggggctgggctgccaggagatctgcccagcatgccataacgctgctcgctgcgaccctgagaccggagcctgcctgtgcctccctggctttgtcggcagccgctgccaggactgtgaggcaggctggtatggtcccagctgccagacaatgtgctcttgtgccaatgatgggcactgccaccaagacacgggacactgcagctgtgcccccgggtggaccggctttagctgccagagagcctgtgatactgggcactggggacctgactgcagccacccctgcaactgcagcgctggccacgggagctgtgatgccatcagcggcctgtgtctgtgtgaggctggctacgtgggcccgcggtgcgagcagtcagagtgtccccagggccactttgggcccggctgtgagcagcggtgccagtgtcagcatggagcagcctgtgaccacgtcagcggggcctgcacctgcccggccggctggaggggcaccttctgcgagcatgcctgcccggccggcttctttggattggactgtcgcagtgcctgcaactgcaccgccggagctgcctgtgatgccgtgaatggctcctgcctctgccccgctggccgccggggcccccgctgtgccgagagtgcctgcccagcccacacctacgggcacaattgcagccaggcctgtgcctgctttaacggggcctcctgtgaccctgtccacgggcagtgccactgtgcccctggctggatggggccctcctgcctgcaggcctgccctgccggcctgtacggcgacaactgtcggcattcctgcctctgccagaacggagggacctgtgaccctgtctcaggccactgtgcgtgcccagagggctgggccggcctggcctgtgaggtagagtgcctcccccgggacgtcagagctggctgccggcacagcggcggttgcctcaacgggggcctgtgtgacccgcacacgggccgctgcctctgcccagccggctggactggggacaagtgtcagagccctgcagcctgtgccaagggcacattcgggcctcactgtgaggggcgctgtgcctgccggtggggaggcccctgccaccttgccaccggggcctgcctctgccctccggggtggcgggggcctcatctttctgcagcctgcctgcggggctggtttggagaggcctgtgcccagcgctgcagctgcccgcctggcgctgcctgccaccacgtcactggggcctgccgctgtccccctggcttcactggctccggctgcgagcaggcctgcccacccggcagctttggggaggactgtgcgcagatgtgccagtgtcccggtgagaacccggcctgccaccctgccaccgggacctgctcatgtgctgctggctaccacggccccagctgccagcaacgatgtccgcccgggcggtatgggccaggctgtgaacagctgtgtgggtgtctcaacgggggctcctgtgatgcggccacgggggcctgccgctgccccactgggttcctcgggacggactgcaacctcacctgtccgcagggccgcttcggccccaactgcacccacgtgtgtgggtgtgggcagggggcggcctgcgaccctgtgaccggcacctgcctctgccccccggggagagccggcgtccgctgtgagcgaggctgcccccagaaccggtttggcgtgggctgcgagcacacctgctcctgcagaaatgggggcctgtgccacgccagcggggcctgtgccacgccagcaagcggcagctgctcctgtggcctgggctggacggggcggcactgcgagctggcctgtccccctgggcgctacggagccgcctgccatctggagtgctcctgccacaacaacagcacgtgtgagcctgccacgggcacctgccgctgcggccccggcttctatggccaggcctgcgagcacccctgtccccctggcttccacggggctggctgccaggggttgtgctggtgtcaacatggagccccctgcgaccccatcagtggccgatgcctctgccctgccggcttccacggccacttctgtgagagggggtgtgagccaggttcatttggagagggctgccaccagcgctgtgactgtgacgggggggcaccctgtgaccctgtcaccggtctctgcctttgcccaccagggcgctcaggagccacctgtaacctggattgcagaaggggccagtttgggcccagctgcaccctgcactgtgactgcgggggtggggctgactgcgaccctgtcagtgggcagtgtcactgtgtggatggctacatggggcccacgtgccgggaaggtgggcccctccggctccccgagaacccgtccttagcccagggctcagcgggcacactgcccgcctccagcagacccacatcccggagcggtggaccagcgaggcactagtagaggcagtcccgtggagcccgcctctccagtcccagccagaggggactctggcctttggtgaccactgagaaggacacttcacgggcccagagctcctggtactgcccttcctttgagggccgtggagggctgtggacagcccagcaacctgtcgctcttggaggctggtgtggccttgaggagggaagcctcgcatggccgctggaagagaggcgcctcctggcctggctctgcagaacccaggggcacgctctgggcctgggctgaggaagtcccgctctccccgcggctctgagttggactgaggacaggtgtgggcgccagtgtgggtgcagtcacagtgcagggtgcagtcacagtgcagggtgc

SEQ ID NO: 860 - protein, 1594 aa, Homo sapiens
MSFLEEARAAGRAVVLALVLLLLPAVPVGASVPPRPLLPLQPGMPHVCAEQELTLVGRRQPCVQALSHTVPVWRAGCGWQAWCVGHERRTVYYMGYRQVYTTEARTVLRCCRGWTQQPDEEGCLSAECSASLCFHGGRCVPGSAQPCHCPPGFQGPRCQYDVDECRTHNGGCQHRCVNTPGSYLCECKPGFRLHTDSRTCLAINSCALGNGGCQHHCVQLTITRHRCQCRPGFQLQEDGRHCVRRSPCANRNGSCMHRCQVVRGLARCECHVGYQLAADGKACEDVDECAAGLAQCAHGCLNTQGSFKCVCHAGYELGADGRQCYRIEMEIVNSCEANNGGCSHGCSHTSAGPLCTCPRGYELDTDQRTCIRCRRLCRQPVLQQVCTNNPGGYECGCYAGYRLSADGCGCEDVDECASSRGGCEHHCTNLAGSFQCSCEAGYRLHEDRRGCSALEEPMVDLDGELPFVRPLPHIAVLQDELPQLFQDDDVGADEEEAELRGEHTLTEKFVCLDDSFGHDCSLTCDDCRNGGTCLLGLDGCDCPEGWTGLICNESCPPDTFGKNCSFSCSCQNGGTCDSVTGACRCPPGVSGTNCEDGCPKGYYGKHCRKKCNCANRGRCHRLYGACLCDPGLYGRFCHLACPPWAFGPGCSEECQCVQPHTQSCDKRDGSCSCKAGFRGERCQAECEPGYFGPGCWQACTCPVGVACDSVSGECGKRCPAGFQGEDCGQECPVGTFGVNCSSSCSCGGAPCHGVTGQCRCPPGRTGEDCEAGECEGLWGLGCQEICPACHNAARCDPETGACLCLPGFVGSRCQDCEAGWYGPSCQTMCSCANDGHCHQDTGHCSCAPGWTGFSCQRACDTGHWGPDCSHPCNCSAGHGSCDAISGLCLCEAGYVGPRCEQSECPQGHFGPGCEQRCQCQHGAACDHVSGACTCPAGWRGTFCEHACPAGFFGLDCRSACNCTAGAACDAVNGSCLCPAGRRGPRCAESACPAHTYGHNCSQACACFNGASCDPVHGQCHCAPGWMGPSCLQACPAGLYGDNCRHSCLCQNGGTCDPVSGHCACPEGWAGLACEVECLPRDVRAGCRHSGGCLNGGLCDPHTGRCLCPAGWTGDKCQSPAACAKGTFGPHCEGRCACRWGGPCHLATGACLCPPGWRGPHLSAACLRGWFGEACAQRCSCPPGAACHHVTGACRCPPGFTGSGCEQACPPGSFGEDCAQMCQCPGENPACHPATGTCSCAAGYHGPSCQQRCPPGRYGPGCEQLCGCLNGGSCDAATGACRCPTGFLGTDCNLTCPQGRFGPNCTHVCGCGQGAACDPVTGTCLCPPGRAGVRCERGCPQNRFGVGCEHTCSCRNGGLCHASGACATPASGSCSCGLGWTGRHCELACPPGRYGAACHLECSCHNNSTCEPATGTCRCGPGFYGQACEHPCPPGFHGAGCQGLCWCQHGAPCDPISGRCLCPAGFHGHFCERGCEPGSFGEGCHQRCDCDGGAPCDPVTGLCLCPPGRSGATCNLDCRRGQFGPSCTLHCDCGGGADCDPVSGQCHCVDGYMGPTCREGGPLRLPENPSLAQGSAGTLPASSRPTSRSGGPARH

SEQ ID NO: 861 - DNA, 522 bp, Homo sapiens
  CDS (2)..(520)
ggatccgtgcctcgctggtccaccgctcatggctcctgcctctgccccgctggccgccggggcccccgctgtgccgagacctgccctgccggcctgtacggcgacaactgtcggcattcctgcctctgccagaacggagggacctgtgaccctgtctcaggcctgcgagcacccctgtccccctggcttccacggggctggctgccaggggttgtgctggtgtcaacatggagccccctgcgaccccatcagtggccgatgcctctgccctgccggcttccacggccacttctgtgagagggattgcagaaggggccagtttgggcccagctgcaccctgcactgtgactgcgggggtggggctgactgcgaccctgtcagtgggcagtgtcactgtgtggatggctacatggggcccacgtgccgggaaggtgggcccctccggctccccgagaacccgtccttagcccagggctcagcgggcacactgcccgcctccagcagacccacatcccgctcgag

SEQ ID NO: 862 - protein, 173 aa, Homo sapiens
DPCLAGPPLMAPASAPLAAGAPAVPRPALPACTATTVGIPASARTEGPVTLSQACEHPCPPGFHGAGCQGLCWCQHGAPCDPISGRCLCPAGFHGHFCERDCRRGQFGPSCTLHCDCGGGADCDPVSGQCHCVDGYMGPTCREGGPLRLPENPSLAQGSAGTLPASSRPTSRS

SEQ ID NO: 863 - DNA, 4255 bp, Homo sapiens
  CDS (2)..(4255)
caccggatccaccatgtcgttccttgaagaggcgagggcagcggggcgcgcggtggtcctggcgttggtgctgctgctgctccccgccgtgcccgtgggcgccagcgttccgccgcggcccctgctcccgctgcagcccggcatgccccacgtgtgtgctgagcaggagctgaccctggtgggccgccgccagccgtgcgtgcaggccttaagccacacggtgccggtgtggaaggccggctgtgggtggcaggcgtggtgcgtgggtcatgagcggagaaccgtctactacatgggctacaggcaggtgtataccacggaggcccggaccgtgctcaggtgctgccgagggtggacgcagcagcccgacgaggagggctgcctctcggctgaatgcagcgccggcctctgttttcacggtggccgttgtgtgccaggctcagcccagccgtgtcactgtccccccggcttccagggaccccgctgtcagtatgatgtggacgaatgccgaacccacaacggtggctgccagcaccggtgcgtgaacaccccaggctcctacctctgtgagtgcaagcccggcttccggctccacactgacagcaggacctgcctggccattaactcctgcgccctgggcaatggcggctgccagcaccactgtgtccagctcacaatcactcggcatcgctgccagtgccggcccgggttccagctccaggaggacggcaggcattgtgtccgtagaagcccgtgtgccaacaggaacggcagctgcatgcacaggtgccaggtggtccggggcctcgcccgctgtgagtgccacgtgggctatcagctagcagcggacggcaaggcctgtgaagatgtggacgaatgtgccgcagggctggcccagtgtgcccatggctgcctcaacacccaggggtccttcaagtgcgtgtgtcacgcgggctatgagctgggcgccgatggccggcagtgctaccggattgagatggaaatcgtgaacagctgtgaggccaacaacggcggctgctcccatggctgcagccacaccagtgctgggcccctgtgcacctgtccccgcggctacgagctggacacagatcagaggacctgcatcgatgtcggcgactgtgcagacagcccgtgctgccagcaggtgtgcaccaacaaccctggcgggtacgagtgcggctgctacgccggctaccggctcagtgccgatggctgcggctgtgaggatgtggatgagtgcgcctccagccgtggcggctgcgagcaccactgcaccaacctggccggctccttccagtgctcctgcgaggccggctaccggctgcacgaggaccgtaggggctgcagccccctggaggagccgatggtggacctggacggcgagctgcctttcgtgcggcccctgccccacattgccgtgctccaggacgagctgccgcaactcttccaggatgacgacgtcggggccgatgaggaagaggcagagttgcggggcgaacacacgctcacagagaagtttgtctgcctggatgactcctttggccatgactgcagcttgacctgtgatgactgcaggaacggagggacctgtctcctgggcctggatggctgtgattgccccgagggctggactgggctcatctgcaatgagacttgtcctccggacacctttgggaagaactgcagcttctcctgcagctgtcagaatggtgggacctgcgactctgtcacgggggcctgccgctgccccccgggtgtcagtggaactaactgtgaggatggctgccccaagggctactatggcaagcactgtcgcaagaaatgcaactgtgccaaccggggccggtgccaccgcctctacggggcctgcctctgcgacccagggctctacggccgcttctgccacctcacctgcccgccgtgggcctttgggccgggctgctcggaggagtgccagtgtgtgcagccccacacgcagtcctgtgacaagagggatggcagctgctcctgcaaggctggcttccggggcgagcgctgtcaggcagagtgtgagccgggctactttgggccggggtgctggcaggcatgcacctgcccagtgggcgtggcctgtgactccgtgagcggcgagtgtgggaagcggtgtcctgctggcttccagggagaggactgtggccaagagtgcccggtggggacgtttggcgtgaactgctcgagctcctgctcctgtgggggggccccctgccacggggtcacggggcagtgccggtgtccaccggggaggactggggaagactgtgaggcagattgtcccgagggccgctgggggctgggctgccaggagatctgcccagcatgccagcacgctgcccgctgcgaccctgagaccggagcctgcctgtgcctccctgacttcgtcggcagccgctgccaggacgtgtgcccagcaggctggtatggtcccagctgccagacaaggtgctcttgtgccaatgatgggcactgccacccagccaccggacactgcagctgtgcccccgggtggaccggctttagctgccagagagcctgtgatactgggcactggggacctgactgcagccacccctgcaactgcagcgctggccacgggagctgtgatgccatcagcggcctgtgtctgtgtgaggctggctacgtgggcccgcggtgcgagcagcagtgtccccagggccactttgggcccggctgtgagcagctgtgccagtgtcagcatggagcagcctgtgaccacgtcagcggggcctgcacctgcccggccggctggaggggcaccttctgcgagcatgcctgcccggccggcttctttggattggactgtcgcagtgcctgcaactgcaccgccggagctgcctgtgatgccgtgaatggctcctgcctctgccccgctggccgccggggcccccgctgtgccgagaagtgcctcccccgggacgtcagagctggctgccggcacagcggcggttgcctcaacgggggcctgtgtgacccgcacacgggccgctgcctctgcccagccggctggactggggacaagtgtcagagcccctgcctgcggggctggtttggagaggcctgtgcccagcgctgcagctgcccgcctggcgctgcctgccaccacgtcactggggcctgccgctgtccccctggcttcactggctccggctgcgagcagggatgtccgcccgggcggtatgggccaggctgtgaacagctgtgtgggtgtctcaacgggggctcctgtgatgcggccacgggggcctgccgctgccccactgggttcctcgggacggactgcaacctcacctgtccgcagggccgcttcggccccaactgcacccacgtgtgtgggtgtgggcagggggcggcctgcgaccctgtgaccggcacctgcctctgccccccggggagagccggcgtccgctgtgagcgaggctgcccccagaaccggtttggcgtgggctgcgagcacacctgctcctgcagaaatgggggcctgtgccacgccagcaacggcagctgctcctgtggcctgggctggacggggcggcactgcgagctggcctgtccccctgggcgctacggagccgcctgccatctggagtgctcctgccacaacaacagcacgtgtgagcctgccacgggcacctgccgctgcggccccggcttctatggccaggcctgcgagcacccctgtccccctggcttccacggggctggctgccaggggttgtgctggtgtcaacatggagccccctgcgaccccatcagtggccgatgcctctgccctgccggcttccacggccacttctgtgagagggggtgtgagccaggttcatttggagagggctgccaccagcgctgtgactgtgacgggggggcaccctgtgaccctgtcaccggtctctgcctttgcccaccagggcgctcaggagccacctgtaacctggattgcagaaggggccagtttgggcccagctgcaccctgcactgtgactgcgggggtggggctgactgcgaccctgtcagtgggcagtgtcactgtgtggatggctacatggggcccacgtgccgggaaggtgggcccctccggctccccgagaacccgtccttagcccagggctcagcgggcacactgcccgcctccagcagacccacatcccggagcggtggaccagcgaggcacggtaccggc

SEQ ID NO: 864 - protein, 1418 aa, Homo sapiens
TGSTMSFLEEARAAGRAVVLALVLLLLPAVPVGASVPPRPLLPLQPGMPHVCAEQELTLVGRRQPCVQALSHTVPVWKAGCGWQAWCVGHERRTVYYMGYRQVYTTEARTVLRCCRGWTQQPDEEGCLSAECSAGLCFHGGRCVPGSAQPCHCPPGFQGPRCQYDVDECRTHNGGCQHRCVNTPGSYLCECKPGFRLHTDSRTCLAINSCALGNGGCQHHCVQLTITRHRCQCRPGFQLQEDGRHCVRRSPCANRNGSCMHRCQVVRGLARCECHVGYQLAADGKACEDVDECAAGLAQCAHGCLNTQGSFKCVCHAGYELGADGRQCYRIEMEIVNSCEANNGGCSHGCSHTSAGPLCTCPRGYELDTDQRTCIDVGDCADSPCCQQVCTNNPGGYECGCYAGYRLSADGCGCEDVDECASSRGGCEHHCTNLAGSFQCSCEAGYRLHEDRRGCSPLEEPMVDLDGELPFVRPLPHIAVLQDELPQLFQDDDVGADEEEAELRGEHTLTEKFVCLDDSFGHDCSLTCDDCRNGGTCLLGLDGCDCPEGWTGLICNETCPPDTFGKNCSFSCSCQNGGTCDSVTGACRCPPGVSGTNCEDGCPKGYYGKHCRKKCNCANRGRCHRLYGACLCDPGLYGRFCHLTCPPWAFGPGCSEECQCVQPHTQSCDKRDGSCSCKAGFRGERCQAECEPGYFGPGCWQACTCPVGVACDSVSGECGKRCPAGFQGEDCGQECPVGTFGVNCSSSCSCGGAPCHGVTGQCRCPPGRTGEDCEADCPEGRWGLGCQEICPACQHAARCDPETGACLCLPDFVGSRCQDVCPAGWYGPSCQTRCSCANDGHCHPATGHCSCAPGWTGFSCQRACDTGHWGPDCSHPCNCSAGHGSCDAISGLCLCEAGYVGPRCEQQCPQGHFGPGCEQLCQCQHGAACDHVSGACTCPAGWRGTFCEHACPAGFFGLDCRSACNCTAGAACDAVNGSCLCPAGRRGPRCAEKCLPRDVRAGCRHSGGCLNGGLCDPHTGRCLCPAGWTGDKCQSPCLRGWFGEACAQRCSCPPGAACHHVTGACRCPPGFTGSGCEQGCPPGRYGPGCEQLCGCLNGGSCDAATGACRCPTGFLGTDCNLTCPQGRFGPNCTHVCGCGQGAACDPVTGTCLCPPGRAGVRCERGCPQNRFGVGCEHTCSCRNGGLCHASNGSCSCGLGWTGRHCELACPPGRYGAACHLECSCHNNSTCEPATGTCRCGPGFYGQACEHPCPPGFHGAGCQGLCWCQHGAPCDPISGRCLCPAGFHGHFCERGCEPGSFGEGCHQRCDCDGGAPCDPVTGLCLCPPGRSGATCNLDCRRGQFGPSCTLHCDCGGGADCDPVSGQCHCVDGYMGPTCREGGPLRLPENPSLAQGSAGTLPASSRPTSRSGGPARHGTG

SEQ ID NO: 865 - DNA, 5000 bp, Homo sapiens
  CDS (28)..(4986)
tgctgttacaggtggagggcagtgtagtctgagcagtactcgttgctgccgcgcgcgccaccagacataatagctgacagactaacagactgttcctttccatgggtcttttctgcagtcaccgtccttgacacgaagctttctagaagatcttcgcgaggatccaccatgtcgttccttgaagaggcgagggcagcggggcgcgcggtggtcctggcgttggtgctgctgctgctccccgccgtgcccgtgggcgccagcgttccgccgcggcccctgctcccgctgcagcccggcatgccccacgtgtgtgctgagcaggagctgaccctggtgggccgccgccagccgtgcgtgcaggccttaagccacacggtgccggtgtggaaggccggctgtgggtggcaggcgtggtgcgtgggtcatgagcggaggaccgtctactacatgggctacaggcaggtgtataccacggaggcccggaccgtgctcaggtgctgccgagggtggatgcagcagcccgacgaggagggctgcctctcggatgtgggtgagtgtgccaacgccaacgggggctgtgcgggtcggtgccgggacaccgtggggggcttctactgccgctggcccccccccagccaccagctgcagggtgatggcgagacttgccaagatgtggacgaatgccgaacccacaacggtggctgccagcaccggtgcgtgaacaccccaggctcctacctctgtgagtgcaagcccggcttccggctccacactgacagcaggacctgcgccattaactcctgcgccctgggcaatggcggctgccagcaccactgtgtccagctcacaatcactcggcatcgctgccagtgccggcccgggttccagctccaggaggacggcaggcattgtgtccgtagaagcccgtgtgccaacaggaacggcagctgcatgcacaggtgccaggtggtccggggcctcgcccgctgtgagtgccacgtgggctatcagctagcagcggacggcaaggcctgtgaagatgtggacgaatgtgccgcagggctggcccagtgtgcccatggctgcctcaacacccaggggtccttcaagtgcgtgtgtcacgcgggctatgagctgggcgccgatggccggcagtgctaccgtattgagatggaaatcgtgaacagctgtgaggccaacaacggcggctgctcccatggctgcagccacaccagtgctgggcccctgtgcacctgtccccgcggctacgagctggacacagatcagaggacctgcatcagatgtcgacgactgtgcagacagcccgtgctgcagcaggtgtgcaccaacaaccctggcgggtacgagtgcggctgctacgccggctaccggctcagtgccgatggctgcggctgcgaggatgtggatgagtgcgcctccagccgtggcggctgcgagcaccactgcaccaacctggccggctccttccagtgctcctgcgaggccggctaccggctgcacgaggaccgtaggggctgcagcgccctggaggagccgatggtggacctggacggcgagctgcctttcgtgcggcccctgccccacattgccgtgctccaggacgagctgccgcaactcttccaggatgacgacgtcggggccgatgaggaagaggcagagttgcggggcgaacacacgctcacagagaagtttgtctgcctggatgactcctttggccatgactgcagcttgacctgtgatgactgcaggaacggagggacctgcctcctgggcctggatggctgtgattgccccgagggctggactgggctcatctgcaatgagagttgtcctccggacacctttgggaagaactgcagcttctcctgcagctgtcagaatggtgggacctgcgactctgtcacgggggcctgccgctgccccccgggtgtcagtggaactaactgtgaggatggctgccccaagggctactatggcaagcactgtcgcaagaaatgcaactgtgccaaccggggccggtgccaccgcctctacggggcctgcctctgcgacccagggctctacggccgcttctgccacctcgcctgcccgccgtgggcctttgggccgggctgctcggaggagtgccagtgtgtgcagccccacacgcagtcctgtgacaagagggatggcagctgctcctgcaaggctggcttccggggcgagcgctgtcaggcagagtgtgagccgggctactttgggccggggtgctggcaggcatgcacctgcccagtgggcgtggcctgtgactccgtgagcggcgagtgtgggaagcggtgtcctgctggcttccagggagaggactgtggccaagagtgcccggtggggacctttggcgtgaactgctcgagctcctgctcctgtgggggggccccctgccacggggtcacggggcagtgccggtgtccgccggggaggactggggaagactgtgaggcaggtgagtgtgagggcctctgggggctgggctgccaggagatctgcccagcatgccataacgctgctcgctgcgaccctgagaccggagcctgcctgtgcctccctggctttgtcggcagccgctgccaggactgtgaggcaggctggtatggtcccagctgccagacaatgtgctcttgtgccaatgatgggcactgccaccaagacacgggacactgcagctgtgcccccgggtggaccggctttagctgccagagagcctgtgatactgggcactggggacctgactgcagccacccctgcaactgcagcgctggccacgggagctgtgatgccatcagcggcctgtgtctgtgtgaggctggctacgtgggcccgcggtgcgagcagtcagagtgtccccagggccactttgggcccggctgtgagcagcggtgccagtgtcagcatggagcagcctgtgaccacgtcagcggggcctgcacctgcccggccggctggaggggcaccttctgcgagcatgcctgcccggccggcttctttggattggactgtcgcagtgcctgcaactgcaccgccggagctgcctgtgatgccgtgaatggctcctgcctctgccccgctggccgccggggcccccgctgtgccgagagtgcctgcccagcccacacctacgggcacaattgcagccaggcctgtgcctgctttaacggggcctcctgtgaccctgtccacgggcagtgccactgtgcccctggctggatggggccctcctgcctgcaggcctgccctgccggcctgtacggcgacaactgtcggcattcctgcctctgccagaacggagggacctgtgaccctgtctcaggccactgtgcgtgcccagagggctgggccggcctggcctgtgaggtagagtgcctcccccgggacgtcagagctggctgccggcacagcggcggttgcctcaacgggggcctgtgtgacccgcacacgggccgctgcctctgcccagccggctggactggggacaagtgtcagagccctgcagcctgtgccaagggcacattcgggcctcactgtgaggggcgctgtgcctgccggtggggaggcccctgccaccttgccaccggggcctgcctctgccctccggggtggcgggggcctcatctttctgcagcctgcctgcggggctggtttggagaggcctgtgcccagcgctgcagctgcccgcctggcgctgcctgccaccacgtcactggggcctgccgctgtccccctggcttcactggctccggctgcgagcaggcctgcccacccggcagctttggggaggactgtgcgcagatgtgccagtgtcccggtgagaacccggcctgccaccctgccaccgggacctgctcatgtgctgctggctaccacggccccagctgccagcaacgatgtccgcccgggcggtatgggccaggctgtgaacagctgtgtgggtgtctcaacgggggctcctgtgatgcggccacgggggcctgccgctgccccactgggttcctcgggacggactgcaacctcacctgtccgcagggccgcttcggccccaactgcacccacgtgtgtgggtgtgggcagggggcggcctgcgaccctgtgaccggcacctgcctctgccccccggggagagccggcgtccgctgtgagcgaggctgcccccagaaccggtttggcgtgggctgcgagcacacctgctcctgcagaaatgggggcctgtgccacgccagcaacggcagctgctcctgtggcctgggctggacggggcggcactgcgagctggcctgtccccctgggcgctacggagccgcctgccatctggagtgctcctgccacaacaacagcacgtgtgagcctgccacgggcacctgccgctgcggccccggcttctatggccaggcctgcgagcacccctgtccccctggcttccacggggctggctgccaggggttgtgctggtgtcaacatggagccccctgcgaccccatcagtggccgatgcctctgccctgccggcttccacggccacttctgtgagagggggtgtgagccaggttcatttggagagggctgccaccagcgctgtgactgtgacgggggggcaccctgtgaccctgtcaccggtctctgcctttgcccaccagggcgctcaggagccacctgtaacctggattgcagaaggggccagtttgggcccagctgcaccctgcactgtgactgcgggggtggggctgactgcgaccctgtcagtgggcagtgtcactgtgtggatggctacatggggcccacgtgccgggaagcgggcacactgcccgcctccagcagacccacatcccggagcggtggaccagcgaggcacgtattccccgggctcgagggtaagcctatccctaaccctctcctcggtctcgattctacgcgtaccggtcatcaccaccatcaccattgagtttaattcat

SEQ ID NO: 866 - protein, 1653 aa, Homo sapiens
SEQYSLLPRAPPDIIADRLTDCSFPWVFSAVTVLDTKLSRRSSRGSTMSFLEEARAAGRAVVLALVLLLLPAVPVGASVPPRPLLPLQPGMPHVCAEQELTLVGRRQPCVQALSHTVPVWKAGCGWQAWCVGHERRTVYYMGYRQVYTTEARTVLRCCRGWMQQPDEEGCLSDVGECANANGGCAGRCRDTVGGFYCRWPPPSHQLQGDGETCQDVDECRTHNGGCQHRCVNTPGSYLCECKPGFRLHTDSRTCAINSCALGNGGCQHHCVQLTITRHRCQCRPGFQLQEDGRHCVRRSPCANRNGSCMHRCQVVRGLARCECHVGYQLAADGKACEDVDECAAGLAQCAHGCLNTQGSFKCVCHAGYELGADGRQCYRIEMEIVNSCEANNGGCSHGCSHTSAGPLCTCPRGYELDTDQRTCIRCRRLCRQPVLQQVCTNNPGGYECGCYAGYRLSADGCGCEDVDECASSRGGCEHHCTNLAGSFQCSCEAGYRLHEDRRGCSALEEPMVDLDGELPFVRPLPHIAVLQDELPQLFQDDDVGADEEEAELRGEHTLTEKFVCLDDSFGHDCSLTCDDCRNGGTCLLGLDGCDCPEGWTGLICNESCPPDTFGKNCSFSCSCQNGGTCDSVTGACRCPPGVSGTNCEDGCPKGYYGKHCRKKCNCANRGRCHRLYGACLCDPGLYGRFCHLACPPWAFGPGCSEECQCVQPHTQSCDKRDGSCSCKAGFRGERCQAECEPGYFGPGCWQACTCPVGVACDSVSGECGKRCPAGFQGEDCGQECPVGTFGVNCSSSCSCGGAPCHGVTGQCRCPPGRTGEDCEAGECEGLWGLGCQEICPACHNAARCDPETGACLCLPGFVGSRCQDCEAGWYGPSCQTMCSCANDGHCHQDTGHCSCAPGWTGFSCQRACDTGHWGPDCSHPCNCSAGHGSCDAISGLCLCEAGYVGPRCEQSECPQGHFGPGCEQRCQCQHGAACDHVSGACTCPAGWRGTFCEHACPAGFFGLDCRSACNCTAGAACDAVNGSCLCPAGRRGPRCAESACPAHTYGHNCSQACACFNGASCDPVHGQCHCAPGWMGPSCLQACPAGLYGDNCRHSCLCQNGGTCDPVSGHCACPEGWAGLACEVECLPRDVRAGCRHSGGCLNGGLCDPHTGRCLCPAGWTGDKCQSPAACAKGTFGPHCEGRCACRWGGPCHLATGACLCPPGWRGPHLSAACLRGWFGEACAQRCSCPPGAACHHVTGACRCPPGFTGSGCEQACPPGSFGEDCAQMCQCPGENPACHPATGTCSCAAGYHGPSCQQRCPPGRYGPGCEQLCGCLNGGSCDAATGACRCPTGFLGTDCNLTCPQGRFGPNCTHVCGCGQGAACDPVTGTCLCPPGRAGVRCERGCPQNRFGVGCEHTCSCRNGGLCHASNGSCSCGLGWTGRHCELACPPGRYGAACHLECSCHNNSTCEPATGTCRCGPGFYGQACEHPCPPGFHGAGCQGLCWCQHGAPCDPISGRCLCPAGFHGHFCERGCEPGSFGEGCHQRCDCDGGAPCDPVTGLCLCPPGRSGATCNLDCRRGQFGPSCTLHCDCGGGADCDPVSGQCHCVDGYMGPTCREAGTLPASSRPTSRSGGPARHVFPGLEGKPIPNPLLGLDSTRTGHHHHHH

SEQ ID NO: 867 - DNA, 5005 bp, Homo sapiens
  CDS (126)..(4985)
aacgggtggagggcagtgtagtctgagcagtactcgttgctgccgcgcgcgccaccagacataatagctgacagactaacagactgttcctttccatgggtcttttctgcagtcaccgtccttgacacgaagctctagccaccatggagacagacacactcctgctatgggtactgctgctctgggttccaggttccactggtgacgcggcccagccggccaggcgcgcgcgccgtacgaagctttcgcgaggatccagcgttccgccgcggcccctgctcccgctgcagcccggcatgccccacgtgtgtgctgagcaggagctgaccctggtgggccgccgccagccgtgcgtgcaggccttaagccacacggtgccggtgtggaaggccggctgtgggtggcaggcgtggtgcgtgggtcatgagcggaggaccgtctactacatgggctacaggcaggtgtataccacggaggcccggaccgtgctcaggtgctgccgagggtggatgcagcagcccgacgaggagggctgcctctcggatgtgggtgagtgtgccaacgccaacgggggctgtgcgggtcggtgccgggacaccgtggggggcttctactgccgctggcccccccccagccaccagctgcagggtgatggcgagacttgccaagatgtggacgaatgccgaacccacaacggtggctgccagcaccggtgcgtgaacaccccaggctcctacctctgtgagtgcaagcccggcttccggctccacactgacagcaggacctgcgccattaactcctgcgccctgggcaatggcggctgccagcaccactgtgtccagctcacaatcactcggcatcgctgccagtgccggcccgggttccagctccaggaggacggcaggcattgtgtccgtagaagcccgtgtgccaacaggaacggcagctgcatgcacaggtgccaggtggtccggggcctcgcccgctgtgagtgccacgtgggctatcagctagcagcggacggcaaggcctgtgaagatgtggacgaatgtgccgcagggctggcccagtgtgcccatggctgcctcaacacccaggggtccttcaagtgcgtgtgtcacgcgggctatgagctgggcgccgatggccggcagtgctaccgtattgagatggaaatcgtgaacagctgtgaggccaacaacggcggctgctcccatggctgcagccacaccagtgctgggcccctgtgcacctgtccccgcggctacgagctggacacagatcagaggacctgcatcagatgtcgacgactgtgcagacagcccgtgctgcagcaggtgtgcaccaacaaccctggcgggtacgagtgcggctgctacgccggctaccggctcagtgccgatggctgcggctgcgaggatgtggatgagtgcgcctccagccgtggcggctgcgagcaccactgcaccaacctggccggctccttccagtgctcctgcgaggccggctaccggctgcacgaggaccgtaggggctgcagcgccctggaggagccgatggtggacctggacggcgagctgcctttcgtgcggcccctgccccacattgccgtgctccaggacgagctgccgcaactcttccaggatgacgacgtcggggccgatgaggaagaggcagagttgcggggcgaacacacgctcacagagaagtttgtctgcctggatgactcctttggccatgactgcagcttgacctgtgatgactgcaggaacggagggacctgcctcctgggcctggatggctgtgattgccccgagggctggactgggctcatctgcaatgagagttgtcctccggacacctttgggaagaactgcagcttctcctgcagctgtcagaatggtgggacctgcgactctgtcacgggggcctgccgctgccccccgggtgtcagtggaactaactgtgaggatggctgccccaagggctactatggcaagcactgtcgcaagaaatgcaactgtgccaaccggggccggtgccaccgcctctacggggcctgcctctgcgacccagggctctacggccgcttctgccacctcgcctgcccgccgtgggcctttgggccgggctgctcggaggagtgccagtgtgtgcagccccacacgcagtcctgtgacaagagggatggcagctgctcctgcaaggctggcttccggggcgagcgctgtcaggcagagtgtgagccgggctactttgggccggggtgctggcaggcatgcacctgcccagtgggcgtggcctgtgactccgtgagcggcgagtgtgggaagcggtgtcctgctggcttccagggagaggactgtggccaagagtgcccggtggggacctttggcgtgaactgctcgagctcctgctcctgtgggggggccccctgccacggggtcacggggcagtgccggtgtccgccggggaggactggggaagactgtgaggcaggtgagtgtgagggcctctgggggctgggctgccaggagatctgcccagcatgccataacgctgctcgctgcgaccctgagaccggagcctgcctgtgcctccctggctttgtcggcagccgctgccaggactgtgaggcaggctggtatggtcccagctgccagacaatgtgctcttgtgccaatgatgggcactgccaccaagacacgggacactgcagctgtgcccccgggtggaccggctttagctgccagagagcctgtgatactgggcactggggacctgactgcagccacccctgcaactgcagcgctggccacgggagctgtgatgccatcagcggcctgtgtctgtgtgaggctggctacgtgggcccgcggtgcgagcagtcagagtgtccccagggccactttgggcccggctgtgagcagcggtgccagtgtcagcatggagcagcctgtgaccacgtcagcggggcctgcacctgcccggccggctggaggggcaccttctgcgagcatgcctgcccggccggcttctttggattggactgtcgcagtgcctgcaactgcaccgccggagctgcctgtgatgccgtgaatggctcctgcctctgccccgctggccgccggggcccccgctgtgccgagagtgcctgcccagcccacacctacgggcacaattgcagccaggcctgtgcctgctttaacggggcctcctgtgaccctgtccacgggcagtgccactgtgcccctggctggatggggccctcctgcctgcaggcctgccctgccggcctgtacggcgacaactgtcggcattcctgcctctgccagaacggagggacctgtgaccctgtctcaggccactgtgcgtgcccagagggctgggccggcctggcctgtgaggtagagtgcctcccccgggacgtcagagctggctgccggcacagcggcggttgcctcaacgggggcctgtgtgacccgcacacgggccgctgcctctgcccagccggctggactggggacaagtgtcagagccctgcagcctgtgccaagggcacattcgggcctcactgtgaggggcgctgtgcctgccggtggggaggcccctgccaccttgccaccggggcctgcctctgccctccggggtggcgggggcctcatctttctgcagcctgcctgcggggctggtttggagaggcctgtgcccagcgctgcagctgcccgcctggcgctgcctgccaccacgtcactggggcctgccgctgtccccctggcttcactggctccggctgcgagcaggcctgcccacccggcagctttggggaggactgtgcgcagatgtgccagtgtcccggtgagaacccggcctgccaccctgccaccgggacctgctcatgtgctgctggctaccacggccccagctgccagcaacgatgtccgcccgggcggtatgggccaggctgtgaacagctgtgtgggtgtctcaacgggggctcctgtgatgcggccacgggggcctgccgctgccccactgggttcctcgggacggactgcaacctcacctgtccgcagggccgcttcggccccaactgcacccacgtgtgtgggtgtgggcagggggcggcctgcgaccctgtgaccggcacctgcctctgccccccggggagagccggcgtccgctgtgagcgaggctgcccccagaaccggtttggcgtgggctgcgagcacacctgctcctgcagaaatgggggcctgtgccacgccagcaacggcagctgctcctgtggcctgggctggacggggcggcactgcgagctggcctgtccccctgggcgctacggagccgcctgccatctggagtgctcctgccacaacaacagcacgtgtgagcctgccacgggcacctgccgctgcggccccggcttctatggccaggcctgcgagcacccctgtccccctggcttccacggggctggctgccaggggttgtgctggtgtcaacatggagccccctgcgaccccatcagtggccgatgcctctgccctgccggcttccacggccacttctgtgagagggggtgtgagccaggttcatttggagagggctgccaccagcgctgtgactgtgacgggggggcaccctgtgaccctgtcaccggtctctgcctttgcccaccagggcgctcaggagccacctgtaacctggattgcagaaggggccagtttgggcccagctgcaccctgcactgtgactgcgggggtggggctgactgcgaccctgtcagtgggcagtgtcactgtgtggatggctacatggggcccacgtgccgggaagcgggcacactgcccgcctccagcagacccacatcccggagcggtggaccagcgaggcacgaattccccgggctcgagggtaagcctatccctaaccctctcctcggtctcgattctacgcgtaccggtcatcaccaccatcaccattgagtttaattcattgattt

SEQ ID NO: 868 - protein, 1620 aa, Homo sapiens
HEALATMETDTLLLWVLLLWVPGSTGDAAQPARRARRTKLSRGSSVPPRPLLPLQPGMPHVCAEQELTLVGRRQPCVQALSHTVPVWKAGCGWQAWCVGHERRTVYYMGYRQVYTTEARTVLRCCRGWMQQPDEEGCLSDVGECANANGGCAGRCRDTVGGFYCRWPPPSHQLQGDGETCQDVDECRTHNGGCQHRCVNTPGSYLCECKPGFRLHTDSRTCAINSCALGNGGCQHHCVQLTITRHRCQCRPGFQLQEDGRHCVRRSPCANRNGSCMHRCQVVRGLARCECHVGYQLAADGKACEDVDECAAGLAQCAHGCLNTQGSFKCVCHAGYELGADGRQCYRIEMEIVNSCEANNGGCSHGCSHTSAGPLCTCPRGYELDTDQRTCIRCRRLCRQPVLQQVCTNNPGGYECGCYAGYRLSADGCGCEDVDECASSRGGCEHHCTNLAGSFQCSCEAGYRLHEDRRGCSALEEPMVDLDGELPFVRPLPHIAVLQDELPQLFQDDDVGADEEEAELRGEHTLTEKFVCLDDSFGHDCSLTCDDCRNGGTCLLGLDGCDCPEGWTGLICNESCPPDTFGKNCSFSCSCQNGGTCDSVTGACRCPPGVSGTNCEDGCPKGYYGKHCRKKCNCANRGRCHRLYGACLCDPGLYGRFCHLACPPWAFGPGCSEECQCVQPHTQSCDKRDGSCSCKAGFRGERCQAECEPGYFGPGCWQACTCPVGVACDSVSGECGKRCPAGFQGEDCGQECPVGTFGVNCSSSCSCGGAPCHGVTGQCRCPPGRTGEDCEAGECEGLWGLGCQEICPACHNAARCDPETGACLCLPGFVGSRCQDCEAGWYGPSCQTMCSCANDGHCHQDTGHCSCAPGWTGFSCQRACDTGHWGPDCSHPCNCSAGHGSCDAISGLCLCEAGYVGPRCEQSECPQGHFGPGCEQRCQCQHGAACDHVSGACTCPAGWRGTFCEHACPAGFFGLDCRSACNCTAGAACDAVNGSCLCPAGRRGPRCAESACPAHTYGHNCSQACACFNGASCDPVHGQCHCAPGWMGPSCLQACPAGLYGDNCRHSCLCQNGGTCDPVSGHCACPEGWAGLACEVECLPRDVRAGCRHSGGCLNGGLCDPHTGRCLCPAGWTGDKCQSPAACAKGTFGPHCEGRCACRWGGPCHLATGACLCPPGWRGPHLSAACLRGWFGEACAQRCSCPPGAACHHVTGACRCPPGFTGSGCEQACPPGSFGEDCAQMCQCPGENPACHPATGTCSCAAGYHGPSCQQRCPPGRYGPGCEQLCGCLNGGSCDAATGACRCPTGFLGTDCNLTCPQGRFGPNCTHVCGCGQGAACDPVTGTCLCPPGRAGVRCERGCPQNRFGVGCEHTCSCRNGGLCHASNGSCSCGLGWTGRHCELACPPGRYGAACHLECSCHNNSTCEPATGTCRCGPGFYGQACEHPCPPGFHGAGCQGLCWCQHGAPCDPISGRCLCPAGFHGHFCERGCEPGSFGEGCHQRCDCDGGAPCDPVTGLCLCPPGRSGATCNLDCRRGQFGPSCTLHCDCGGGADCDPVSGQCHCVDGYMGPTCREAGTLPASSRPTSRSGGPARHEFPGLEGKPIPNPLLGLDSTRTGHHHHHH

SEQ ID NO: 869 - DNA, 7337 bp, Homo sapiens
  CDS (1)..(4212)
  misc_feature (6034)..(6034): Wherein n may be a, c, g or t
  misc_feature (7262)..(7262): Wherein n may be a, c, g or t
atgcccatgggacattctgacaggtggtcttggcgtctcctgaggctggcactgccactcccagtctggttgccggctgggggtggccgaggcgctgactctccatgtctctgttccaggccccacgtgtgtgctgagcaggagctgaccctggtgggccgccgccagccgtgcgtgcaggccttaagccacacggtgccggtgtggaaggccggctgtgggtggcaggcgtggtgcgtgggtcatgagcggaggaccgtctactacatgggctacaggcaggtgtataccacggaggcccggaccgtgctcaggtgctgccgagggtggatgcagcagcccgacgaggagggctgcctctcggatgtgggtgagtgtgccaacgccaacgggggctgtgcgggtcggtgccgggacaccgtggggggcttctactgccgctggcccccccccagccaccagctgcagggtgatggcgagacttgccaagatgtggacgaatgccgaacccacaacggtggctgccagcaccggtgcgtgaacaccccaggctcctacctctgtgagtgcaagcccggcttccggctccacactgacagcaggacctgcgccattaactcctgcgccctgggcaatggcggctgccagcaccactgtgtccagctcacaatcactcggcatcgctgccagtgccggcccgggttccagctccaggaggacggcaggcattgtgtccgtagaagcccgtgtgccaacaggaacggcagctgcatgcacaggtgccaggtggtccggggcctcgcccgctgtgagtgccacgtgggctatcagctagcagcggacggcaaggcctgtgaagatgtggacgaatgtgccgcagggctggcccagtgtgcccatggctgcctcaacacccaggggtccttcaagtgcgtgtgtcacgcgggctatgagctgggcgccgatggccggcagtgctaccgtattgagatggaaatcgtgaacagctgtgaggccaacaacggcggctgctcccatggctgcagccacaccagtgctgggcccctgtgcacctgtccccgcggctacgagctggacacagatcagaggacctgcatcagatgtcgacgactgtgcagacagcccgtgctgcagcaggtgtgcaccaacaaccctggcgggtacgagtgcggctgctacgccggctaccggctcagtgccgatggctgcggctgcgaggatgtggatgagtgcgcctccagccgtggcggctgcgagcaccactgcaccaacctggccggctccttccagtgctcctgcgaggccggctaccggctgcacgaggaccgtaggggctgcagcgccctggaggagccgatggtggacctggacggcgagctgcctttcgtgcggcccctgccccacattgccgtgctccaggacgagctgccgcaactcttccaggatgacgacgtcggggccgatgaggaagaggcagagttgcggggcgaacacacgctcacagagaagtttgtctgcctggatgactcctttggccatgactgcagcttgacctgtgatgactgcaggaacggagggacctgcctcctgggcctggatggctgtgattgccccgagggctggactgggctcatctgcaatgagagttgtcctccggacacctttgggaagaactgcagcttctcctgcagctgtcagaatggtgggacctgcgactctgtcacgggggcctgccgctgccccccgggtgtcagtggaactaactgtgaggatggctgccccaagggctactatggcaagcactgtcgcaagaaatgcaactgtgccaaccggggccggtgccaccgcctctacggggcctgcctctgcgacccagggctctacggccgcttctgccacctcgcctgcccgccgtgggcctttgggccgggctgctcggaggagtgccagtgtgtgcagccccacacgcagtcctgtgacaagagggatggcagctgctcctgcaaggctggcttccggggcgagcgctgtcaggcagagtgtgagccgggctactttgggccggggtgctggcaggcatgcacctgcccagtgggcgtggcctgtgactccgtgagcggcgagtgtgggaagcggtgtcctgctggcttccagggagaggactgtggccaagagtgcccggtggggacctttggcgtgaactgctcgagctcctgctcctgtgggggggccccctgccacggggtcacggggcagtgccggtgtccgccggggaggactggggaagactgtgaggcaggtgagtgtgagggcctctgggggctgggctgccaggagatctgcccagcatgccataacgctgctcgctgcgaccctgagaccggagcctgcctgtgcctccctggctttgtcggcagccgctgccaggactgtgaggcaggctggtatggtcccagctgccagacaatgtgctcttgtgccaatgatgggcactgccaccaagacacgggacactgcagctgtgcccccgggtggaccggctttagctgccagagagcctgtgatactgggcactggggacctgactgcagccacccctgcaactgcagcgctggccacgggagctgtgatgccatcagcggcctgtgtctgtgtgaggctggctacgtgggcccgcggtgcgagcagtcagagtgtccccagggccactttgggcccggctgtgagcagcggtgccagtgtcagcatggagcagcctgtgaccacgtcagcggggcctgcacctgcccggccggctggaggggcaccttctgcgagcatgcctgcccggccggcttctttggattggactgtcgcagtgcctgcaactgcaccgccggagctgcctgtgatgccgtgaatggctcctgcctctgccccgctggccgccggggcccccgctgtgccgagagtgcctgcccagcccacacctacgggcacaattgcagccaggcctgtgcctgctttaacggggcctcctgtgaccctgtccacgggcagtgccactgtgcccctggctggatggggccctcctgcctgcaggcctgccctgccggcctgtacggcgacaactgtcggcattcctgcctctgccagaacggagggacctgtgaccctgtctcaggccactgtgcgtgcccagagggctgggccggcctggcctgtgaggtagagtgcctcccccgggacgtcagagctggctgccggcacagcggcggttgcctcaacgggggcctgtgtgacccgcacacgggccgctgcctctgcccagccggctggactggggacaagtgtcagagccctgcagcctgtgccaagggcacattcgggcctcactgtgaggggcgctgtgcctgccggtggggaggcccctgccaccttgccaccggggcctgcctctgccctccggggtggcgggggcctcatctttctgcagcctgcctgcggggctggtttggagaggcctgtgcccagcgctgcagctgcccgcctggcgctgcctgccaccacgtcactggggcctgccgctgtccccctggcttcactggctccggctgcgagcaggcctgcccacccggcagctttggggaggactgtgcgcagatgtgccagtgtcccggtgagaacccggcctgccaccctgccaccgggacctgctcatgtgctgctggctaccacggccccagctgccagcaacgatgtccgcccgggcggtatgggccaggctgtgaacagctgtgtgggtgtctcaacgggggctcctgtgatgcggccacgggggcctgccgctgccccactgggttcctcgggacggactgcaacctcacctgtccgcagggccgcttcggccccaactgcacccacgtgtgtgggtgtgggcagggggcggcctgcgaccctgtgaccggcacctgcctctgccccccggggagagccggcgtccgctgtgagcgaggctgcccccagaaccggtttggcgtgggctgcgagcacacctgctcctgcagaaatgggggcctgtgccacgccagcaagcggcagctgctcctgtggcctgggctggacggggcggcactgcgagctggcctgtccccctgggcgctacggagccgcctgccatctggagtgctcctgccacaacaacagcacgtgtgagcctgccacgggcacctgccgctgcggccccggcttctatggccaggcctgcgagcacccctgtccccctggcttccacggggctggctgccaggggttgtgctggtgtcaacatggagccccctgcgaccccatcagtggccgatgcctctgccctgccggcttccacggccacttctgtgagagggggtgtgagccaggttcatttggagagggctgccaccagcgctgtgactgtgacgggggggcaccctgtgaccctgtcaccggtctctgcctttgcccaccagggcgctcaggagccacctgtaacctggattgcagaaggggccagtttgggcccagctgcaccctgcactgtgactgcgggggtggggctgactgcgaccctgtcagtgggcagtgtcactgtgtggatggctacatggggcccacgtgccgggaaggtgggcccctccggctccccgagaacccgtccttagcccagggctcagcgggcacactgcccgcctccagcagacccacatcccggagcggtggaccagcgaggcactagtagaggcagtcccgtggagcccgcctctccagtcccagccagaggggaccctggcctttggtgaccactgagaaggacacttcacgggcccagagctcctggtactgcccttcctttgagggccgtggagggctgtggacagcccagcaacctgtcgctcttggaggctggtgtggccttgaggagggaagcctcgcatggccgctggaagagaggcgcctcctggcctggctctgcagaacccaggggcacgctctgggcctgggctgaggaagtcccgctctccccgcggctctgagttggactgaggacaggtgtgggcgccagtgtgggtgcaggcgcaggtgcaggcacagggccactgtcctccaggcaggctttttggtgctaggccctgggactggaagtcgcccagcccgtatttatgtaaaggtatttatgggccactgcacatgcccgctgcagccctgggatcagctggaagctgcctgtcatctcctgcccaatccccagaaaccctgattcaggtctgcaggctcctgcgggctcaccaggctgctggctccggtaccatgtaaacctaggaaggtaaaggagcaggcaacctcctcgtggcctgtgtgtttgctgtgttacgtggactctgtgtgggctcctccctggggcccggccagcataacggtgcacccagggacctcccagtgcacccggggccctttgcaggggtgggggtgccacacaagtgaagaagttgggactcatctcagttcccagtgctattgaggagaacgctggggctgcattcattaccgctgagacccagagactggctgttcccagagaatggcccagggggaggagggctggtgtggaggggcaacctggactgaggccgaactcccttgggctcaccccacccacccctacctgagcatcagcagtggggggagggcagcatcgcaggggcagggactccctgggtgaggacagaccagccctcccgagcacctggcactcatgggctgaggctgacttctcctggaagaagggcccagagtggaaggaagaggcagagggtagaggtggtggctgggggctcctctgcagagtggggtggccaatggagagggctgcactcacaccgcaacataggactctctctcccttaagaaggcccccttagggtctgggctgccgcccccatcaccctaaaaccagccaaggtagctgaggccccagggcagacaatttcaccagcaggangaggaggagtccagtgagcttggttgctcacagacagcaagggagctgtcacagaggaagctgatgaatggaccgctgtggggagactttaaagtagaacagtgataagggagggcaggatggtggggatgcagaagcagcagccagagagagacggactggggtgcagacggagtgtggaaaacgcataccttgaaatgaagcatccagcagatggggtgagtggatacagctcaggagattctcccaggaatagcagggaggcgtaaagagagacaacgtacagagatagatgaatggaaatgggtaagggaggtgttcattcacatccatctaactgcaaaatacaaaagtaagaagtcattgacatgaagcaacgacgaccaagacgttctcagatctaaaggtgaatgatctcagtcagcctggaaatgcacaaggtggaaaaataacataaaaaagccataagaccttgaagaacatcaatgtcaaagataaattctaaagtcccagagaaaaaagaatgggaatcaaattgacctcagactatacgtgagaaacacggagagccagaaaactgtgatgttccatcctcagagtttgaaggaaatatttgaaggctgaattttacatccagctaaactatcaaaggcatgcaaagtccatgttattcttaggccttcaaggcctcggccatttttctacagaaaagcctgattttaaaatgctcttagagacgttctccagccagaagagaaagaagccaggagggtgctctgagatattcagtcaccacagttcccaaatggcctaggaattcagagagtcagaatatcaccattactccccaatgggaacccccgacagtctcagcatggtgtgagggtgtggacggggggcctggcaggtaccaatcactcatcccgctcagtgaagacacagtgttcagctacggaagccataaggcaggccgagcttctgcccatccggaggaaatctcagctatccaacggcggtcaggagcagaggaaaataaagcagaataactagaaaacacgctcacagatcctaatgttaacggttacaaatgacgacggaaaaacaaactcctgaccatatattatatagtttcaagcagcaagaaggaggatattgaacattctcaacacacataataaacgcttgagatgatgatatgctcattaccctgatttgatcactagacatnccatgtatcaaaacatcactgtgtatccgatgaatatctacaattattgtcaattaaaaacatcattaaaaacaa

SEQ ID NO: 870 - protein, 1404 aa, Homo sapiens
MPMGHSDRWSWRLLRLALPLPVWLPAGGGRGADSPCLCSRPHVCAEQELTLVGRRQPCVQALSHTVPVWKAGCGWQAWCVGHERRTVYYMGYRQVYTTEARTVLRCCRGWMQQPDEEGCLSDVGECANANGGCAGRCRDTVGGFYCRWPPPSHQLQGDGETCQDVDECRTHNGGCQHRCVNTPGSYLCECKPGFRLHTDSRTCAINSCALGNGGCQHHCVQLTITRHRCQCRPGFQLQEDGRHCVRRSPCANRNGSCMHRCQVVRGLARCECHVGYQLAADGKACEDVDECAAGLAQCAHGCLNTQGSFKCVCHAGYELGADGRQCYRIEMEIVNSCEANNGGCSHGCSHTSAGPLCTCPRGYELDTDQRTCIRCRRLCRQPVLQQVCTNNPGGYECGCYAGYRLSADGCGCEDVDECASSRGGCEHHCTNLAGSFQCSCEAGYRLHEDRRGCSALEEPMVDLDGELPFVRPLPHIAVLQDELPQLFQDDDVGADEEEAELRGEHTLTEKFVCLDDSFGHDCSLTCDDCRNGGTCLLGLDGCDCPEGWTGLICNESCPPDTFGKNCSFSCSCQNGGTCDSVTGACRCPPGVSGTNCEDGCPKGYYGKHCRKKCNCANRGRCHRLYGACLCDPGLYGRFCHLACPPWAFGPGCSEECQCVQPHTQSCDKRDGSCSCKAGFRGERCQAECEPGYFGPGCWQACTCPVGVACDSVSGECGKRCPAGFQGEDCGQECPVGTFGVNCSSSCSCGGAPCHGVTGQCRCPPGRTGEDCEAGECEGLWGLGCQEICPACHNAARCDPETGACLCLPGFVGSRCQDCEAGWYGPSCQTMCSCANDGHCHQDTGHCSCAPGWTGFSCQRACDTGHWGPDCSHPCNCSAGHGSCDAISGLCLCEAGYVGPRCEQSECPQGHFGPGCEQRCQCQHGAACDHVSGACTCPAGWRGTFCEHACPAGFFGLDCRSACNCTAGAACDAVNGSCLCPAGRRGPRCAESACPAHTYGHNCSQACACFNGASCDPVHGQCHCAPGWMGPSCLQACPAGLYGDNCRHSCLCQNGGTCDPVSGHCACPEGWAGLACEVECLPRDVRAGCRHSGGCLNGGLCDPHTGRCLCPAGWTGDKCQSPAACAKGTFGPHCEGRCACRWGGPCHLATGACLCPPGWRGPHLSAACLRGWFGEACAQRCSCPPGAACHHVTGACRCPPGFTGSGCEQACPPGSFGEDCAQMCQCPGENPACHPATGTCSCAAGYHGPSCQQRCPPGRYGPGCEQLCGCLNGGSCDAATGACRCPTGFLGTDCNLTCPQGRFGPNCTHVCGCGQGAACDPVTGTCLCPPGRAGVRCERGCPQNRFGVGCEHTCSCRNGGLCHASKRQLLLWPGLDGAALRAGLSPWALRSRLPSGVLLPQQQHV

SEQ ID NO: 871 - DNA, 7319 bp, Homo sapiens
  CDS (1)..(4194)
  misc_feature (6016)..(6016): Wherein n may be a, c, g or t
  misc_feature (7244)..(7244): Wherein n may be a, c, g or t
atgcccatgggacattctgacaggtggtcttggcgtctcctgaggctggcactgccactcccagtctggttgccggctgggggtggccgaggcgctgactctccatgtctctgttccaggccccacgtgtgtgctgagcaggagctgaccctggtgggccgccgccagccgtgcgtgcaggccttaagccacacggtgccggtgtggaaggccggctgtgggtggcaggcgtggtgcgtgggtcatgagcggagaaccgtctactacatgggctacaggcaggtgtataccacggaggcccggaccgtgctcaggtgctgccgagggtggacgcagcagcccgacgaggagggctgcctctcggctgaatgcagcgccagcctctgttttcacggtggccgttgtgtgccaggctcagcccagccgtgtcactgtccccccggcttccagggaccccgctgtcagtatgatgtggacgaatgccgaacccacaacggtggctgccagcaccggtgcgtgaacaccccaggctcctacctctgtgagtgcaagcccggcttccggctccacactgacagcaggacctgcctggccattaactcctgcgccctgggcaatggcggctgccagcaccactgtgtccagctcacaatcactcggcatcgctgccagtgccggcccgggttccagctccaggaggacggcaggcattgtgtccgtagaagcccgtgtgccaacaggaacggcagctgcatgcacaggtgccaggtggtccggggcctcgcccgctgtgagtgccacgtgggctatcagctagcagcggacggcaaggcctgtgaagatgtggacgaatgtgccgcagggctggcccagtgtgcccatggctgcctcaacacccaggggtccttcaagtgcgtgtgtcacgcgggctatgagctgggcgccgatggccggcagtgctaccgtattgagatggaaatcgtgaacagctgtgaggccaacaacggcggctgctcccatggctgcagccacaccagtgctgggcccctgtgcacctgtccccgcggctacgagctggacacagatcagaggacctgcatcagatgtcgacgactgtgcagacagcccgtgctgcagcaggtgtgcaccaacaaccctggcgggtacgagtgcggctgctacgccggctaccggctcagtgccgatggctgcggctgcgaggatgtggatgagtgcgcctccagccgtggcggctgcgagcaccactgcaccaacctggccggctccttccagtgctcctgcgaggccggctaccggctgcacgaggaccgtaggggctgcagcgccctggaggagccgatggtggacctggacggcgagctgcctttcgtgcggcccctgccccacattgccgtgctccaggacgagctgccgcaactcttccaggatgacgacgtcggggccgatgaggaagaggcagagttgcggggcgaacacacgctcacagagaagtttgtctgcctggatgactcctttggccatgactgcagcttgacctgtgatgactgcaggaacggagggacctgcctcctgggcctggatggctgtgattgccccgagggctggactgggctcatctgcaatgagagttgtcctccggacacctttgggaagaactgcagcttctcctgcagctgtcagaatggtgggacctgcgactctgtcacgggggcctgccgctgccccccgggtgtcagtggaactaactgtgaggatggctgccccaagggctactatggcaagcactgtcgcaagaaatgcaactgtgccaaccggggccggtgccaccgcctctacggggcctgcctctgcgacccagggctctacggccgcttctgccacctcgcctgcccgccgtgggcctttgggccgggctgctcggaggagtgccagtgtgtgcagccccacacgcagtcctgtgacaagagggatggcagctgctcctgcaaggctggcttccggggcgagcgctgtcaggcagagtgtgagccgggctactttgggccggggtgctggcaggcatgcacctgcccagtgggcgtggcctgtgactccgtgagcggcgagtgtgggaagcggtgtcctgctggcttccagggagaggactgtggccaagagtgcccggtggggacctttggcgtgaactgctcgagctcctgctcctgtgggggggccccctgccacggggtcacggggcagtgccggtgtccgccggggaggactggggaagactgtgaggcaggtgagtgtgagggcctctgggggctgggctgccaggagatctgcccagcatgccataacgctgctcgctgcgaccctgagaccggagcctgcctgtgcctccctggctttgtcggcagccgctgccaggactgtgaggcaggctggtatggtcccagctgccagacaatgtgctcttgtgccaatgatgggcactgccaccaagacacgggacactgcagctgtgcccccgggtggaccggctttagctgccagagagcctgtgatactgggcactggggacctgactgcagccacccctgcaactgcagcgctggccacgggagctgtgatgccatcagcggcctgtgtctgtgtgaggctggctacgtgggcccgcggtgcgagcagtcagagtgtccccagggccactttgggcccggctgtgagcagcggtgccagtgtcagcatggagcagcctgtgaccacgtcagcggggcctgcacctgcccggccggctggaggggcaccttctgcgagcatgcctgcccggccggcttctttggattggactgtcgcagtgcctgcaactgcaccgccggagctgcctgtgatgccgtgaatggctcctgcctctgccccgctggccgccggggcccccgctgtgccgagagtgcctgcccagcccacacctacgggcacaattgcagccaggcctgtgcctgctttaacggggcctcctgtgaccctgtccacgggcagtgccactgtgcccctggctggatggggccctcctgcctgcaggcctgccctgccggcctgtacggcgacaactgtcggcattcctgcctctgccagaacggagggacctgtgaccctgtctcaggccactgtgcgtgcccagagggctgggccggcctggcctgtgaggtagagtgcctcccccgggacgtcagagctggctgccggcacagcggcggttgcctcaacgggggcctgtgtgacccgcacacgggccgctgcctctgcccagccggctggactggggacaagtgtcagagccctgcagcctgtgccaagggcacattcgggcctcactgtgaggggcgctgtgcctgccggtggggaggcccctgccaccttgccaccggggcctgcctctgccctccggggtggcgggggcctcatctttctgcagcctgcctgcggggctggtttggagaggcctgtgcccagcgctgcagctgcccgcctggcgctgcctgccaccacgtcactggggcctgccgctgtccccctggcttcactggctccggctgcgagcaggcctgcccacccggcagctttggggaggactgtgcgcagatgtgccagtgtcccggtgagaacccggcctgccaccctgccaccgggacctgctcatgtgctgctggctaccacggccccagctgccagcaacgatgtccgcccgggcggtatgggccaggctgtgaacagctgtgtgggtgtctcaacgggggctcctgtgatgcggccacgggggcctgccgctgccccactgggttcctcgggacggactgcaacctcacctgtccgcagggccgcttcggccccaactgcacccacgtgtgtgggtgtgggcagggggcggcctgcgaccctgtgaccggcacctgcctctgccccccggggagagccggcgtccgctgtgagcgaggctgcccccagaaccggtttggcgtgggctgcgagcacacctgctcctgcagaaatgggggcctgtgccacgccagcaagcggcagctgctcctgtggcctgggctggacggggcggcactgcgagctggcctgtccccctgggcgctacggagccgcctgccatctggagtgctcctgccacaacaacagcacgtgtgagcctgccacgggcacctgccgctgcggccccggcttctatggccaggcctgcgagcacccctgtccccctggcttccacggggctggctgccaggggttgtgctggtgtcaacatggagccccctgcgaccccatcagtggccgatgcctctgccctgccggcttccacggccacttctgtgagagggggtgtgagccaggttcatttggagagggctgccaccagcgctgtgactgtgacgggggggcaccctgtgaccctgtcaccggtctctgcctttgcccaccagggcgctcaggagccacctgtaacctggattgcagaaggggccagtttgggcccagctgcaccctgcactgtgactgcgggggtggggctgactgcgaccctgtcagtgggcagtgtcactgtgtggatggctacatggggcccacgtgccgggaaggtgggcccctccggctccccgagaacccgtccttagcccagggctcagcgggcacactgcccgcctccagcagacccacatcccggagcggtggaccagcgaggcactagtagaggcagtcccgtggagcccgcctctccagtcccagccagaggggaccctggcctttggtgaccactgagaaggacacttcacgggcccagagctcctggtactgcccttcctttgagggccgtggagggctgtggacagcccagcaacctgtcgctcttggaggctggtgtggccttgaggagggaagcctcgcatggccgctggaagagaggcgcctcctggcctggctctgcagaacccaggggcacgctctgggcctgggctgaggaagtcccgctctccccgcggctctgagttggactgaggacaggtgtgggcgccagtgtgggtgcaggcgcaggtgcaggcacagggccactgtcctccaggcaggctttttggtgctaggccctgggactggaagtcgcccagcccgtatttatgtaaaggtatttatgggccactgcacatgcccgctgcagccctgggatcagctggaagctgcctgtcatctcctgcccaatccccagaaaccctgattcaggtctgcaggctcctgcgggctcaccaggctgctggctccggtaccatgtaaacctaggaaggtaaaggagcaggcaacctcctcgtggcctgtgtgtttgctgtgttacgtggactctgtgtgggctcctccctggggcccggccagcataacggtgcacccagggacctcccagtgcacccggggccctttgcaggggtgggggtgccacacaagtgaagaagttgggactcatctcagttcccagtgctattgaggagaacgctggggctgcattcattaccgctgagacccagagactggctgttcccagagaatggcccagggggaggagggctggtgtggaggggcaacctggactgaggccgaactcccttgggctcaccccacccacccctacctgagcatcagcagtggggggagggcagcatcgcaggggcagggactccctgggtgaggacagaccagccctcccgagcacctggcactcatgggctgaggctgacttctcctggaagaagggcccagagtggaaggaagaggcagagggtagaggtggtggctgggggctcctctgcagagtggggtggccaatggagagggctgcactcacaccgcaacataggactctctctcccttaagaaggcccccttagggtctgggctgccgcccccatcaccctaaaaccagccaaggtagctgaggccccagggcagacaatttcaccagcaggangaggaggagtccagtgagcttggttgctcacagacagcaagggagctgtcacagaggaagctgatgaatggaccgctgtggggagactttaaagtagaacagtgataagggagggcaggatggtggggatgcagaagcagcagccagagagagacggactggggtgcagacggagtgtggaaaacgcataccttgaaatgaagcatccagcagatggggtgagtggatacagctcaggagattctcccaggaatagcagggaggcgtaaagagagacaacgtacagagatagatgaatggaaatgggtaagggaggtgttcattcacatccatctaactgcaaaatacaaaagtaagaagtcattgacatgaagcaacgacgaccaagacgttctcagatctaaaggtgaatgatctcagtcagcctggaaatgcacaaggtggaaaaataacataaaaaagccataagaccttgaagaacatcaatgtcaaagataaattctaaagtcccagagaaaaaagaatgggaatcaaattgacctcagactatacgtgagaaacacggagagccagaaaactgtgatgttccatcctcagagtttgaaggaaatatttgaaggctgaattttacatccagctaaactatcaaaggcatgcaaagtccatgttattcttaggccttcaaggcctcggccatttttctacagaaaagcctgattttaaaatgctcttagagacgttctccagccagaagagaaagaagccaggagggtgctctgagatattcagtcaccacagttcccaaatggcctaggaattcagagagtcagaatatcaccattactccccaatgggaacccccgacagtctcagcatggtgtgagggtgtggacggggggcctggcaggtaccaatcactcatcccgctcagtgaagacacagtgttcagctacggaagccataaggcaggccgagcttctgcccatccggaggaaatctcagctatccaacggcggtcaggagcagaggaaaataaagcagaataactagaaaacacgctcacagatcctaatgttaacggttacaaatgacgacggaaaaacaaactcctgaccatatattatatagtttcaagcagcaagaaggaggatattgaacattctcaacacacataataaacgcttgagatgatgatatgctcattaccctgatttgatcactagacatnccatgtatcaaaacatcactgtgtatccgatgaatatctacaattattgtcaattaaaaacatcattaaaaacaa

SEQ ID NO: 872 - protein, 1398 aa, Homo sapiens
MPMGHSDRWSWRLLRLALPLPVWLPAGGGRGADSPCLCSRPHVCAEQELTLVGRRQPCVQALSHTVPVWKAGCGWQAWCVGHERRTVYYMGYRQVYTTEARTVLRCCRGWTQQPDEEGCLSAECSASLCFHGGRCVPGSAQPCHCPPGFQGPRCQYDVDECRTHNGGCQHRCVNTPGSYLCECKPGFRLHTDSRTCLAINSCALGNGGCQHHCVQLTITRHRCQCRPGFQLQEDGRHCVRRSPCANRNGSCMHRCQVVRGLARCECHVGYQLAADGKACEDVDECAAGLAQCAHGCLNTQGSFKCVCHAGYELGADGRQCYRIEMEIVNSCEANNGGCSHGCSHTSAGPLCTCPRGYELDTDQRTCIRCRRLCRQPVLQQVCTNNPGGYECGCYAGYRLSADGCGCEDVDECASSRGGCEHHCTNLAGSFQCSCEAGYRLHEDRRGCSALEEPMVDLDGELPFVRPLPHIAVLQDELPQLFQDDDVGADEEEAELRGEHTLTEKFVCLDDSFGHDCSLTCDDCRNGGTCLLGLDGCDCPEGWTGLICNESCPPDTFGKNCSFSCSCQNGGTCDSVTGACRCPPGVSGTNCEDGCPKGYYGKHCRKKCNCANRGRCHRLYGACLCDPGLYGRFCHLACPPWAFGPGCSEECQCVQPHTQSCDKRDGSCSCKAGFRGERCQAECEPGYFGPGCWQACTCPVGVACDSVSGECGKRCPAGFQGEDCGQECPVGTFGVNCSSSCSCGGAPCHGVTGQCRCPPGRTGEDCEAGECEGLWGLGCQEICPACHNAARCDPETGACLCLPGFVGSRCQDCEAGWYGPSCQTMCSCANDGHCHQDTGHCSCAPGWTGFSCQRACDTGHWGPDCSHPCNCSAGHGSCDAISGLCLCEAGYVGPRCEQSECPQGHFGPGCEQRCQCQHGAACDHVSGACTCPAGWRGTFCEHACPAGFFGLDCRSACNCTAGAACDAVNGSCLCPAGRRGPRCAESACPAHTYGHNCSQACACFNGASCDPVHGQCHCAPGWMGPSCLQACPAGLYGDNCRHSCLCQNGGTCDPVSGHCACPEGWAGLACEVECLPRDVRAGCRHSGGCLNGGLCDPHTGRCLCPAGWTGDKCQSPAACAKGTFGPHCEGRCACRWGGPCHLATGACLCPPGWRGPHLSAACLRGWFGEACAQRCSCPPGAACHHVTGACRCPPGFTGSGCEQACPPGSFGEDCAQMCQCPGENPACHPATGTCSCAAGYHGPSCQQRCPPGRYGPGCEQLCGCLNGGSCDAATGACRCPTGFLGTDCNLTCPQGRFGPNCTHVCGCGQGAACDPVTGTCLCPPGRAGVRCERGCPQNRFGVGCEHTCSCRNGGLCHASKRQLLLWPGLDGAALRAGLSPWALRSRLPSGVLLPQQQHV

SEQ ID NO: 873 - DNA, 4733 bp, Homo sapiens
  CDS (1)..(4350)
atgcccatgggacattctgacaggtggtcttggcgtctcctgaggctggcactgccactcccagtctggttgccggctgggggtggccgaggcgctgactctccatgtctctgttccaggccccacgtgtgtgctgagcaggagctgaccctggtgggccgccgccagccgtgcgtgcaggccttaagccacacggtgccggtgtggaaggccggctgtgggtggcaggcgtggtgcgtgggtcatgagcggagaaccgtctactacatgggctacaggcaggtgtataccacggaggcccggaccgtgctcaggtgctgccgagggtggacgcagcagcccgacgaggagggctgcctctcggctgaatgcagcgccagcctctgttttcacggtggccgttgtgtgccaggctcagcccagccgtgtcactgtccccccggcttccagggaccccgctgtcagtatgatgtggacgaatgccgaacccacaacggtggctgccagcaccggtgcgtgaacaccccaggctcctacctctgtgagtgcaagcccggcttccggctccacactgacagcaggacctgcctggccattaactcctgcgccctgggcaatggcggctgccagcaccactgtgtccagctcacaatcactcggcatcgctgccagtgccggcccgggttccagctccaggaggacggcaggcattgtgtccgtagaagcccgtgtgccaacaggaacggcagctgcatgcacaggtgccaggtggtccggggcctcgcccgctgtgagtgccacgtgggctatcagctagcagcggacggcaaggcctgtgaagatgtggacgaatgtgccgcagggctggcccagtgtgcccatggctgcctcaacacccaggggtccttcaagtgcgtgtgtcacgcgggctatgagctgggcgccgatggccggcagtgctaccgtattgagatggaaatcgtgaacagctgtgaggccaacaacggcggctgctcccatggctgcagccacaccagtgctgggcccctgtgcacctgtccccgcggctacgagctggacacagatcagaggacctgcatcagatgtcgacgactgtgcagacagcccgtgctgcagcaggtgtgcaccaacaaccctggcgggtacgagtgcggctgctacgccggctaccggctcagtgccgatggctgcggctgcgaggatgtggatgagtgcgcctccagccgtggcggctgcgagcaccactgcaccaacctggccggctccttccagtgctcctgcgaggccggctaccggctgcacgaggaccgtaggggctgcagcgccctggaggagccgatggtggacctggacggcgagctgcctttcgtgcggcccctgccccacattgccgtgctccaggacgagctgccgcaactcttccaggatgacgacgtcggggccgatgaggaagaggcagagttgcggggcgaacacacgctcacagagaagtttgtctgcctggatgactcctttggccatgactgcagcttgacctgtgatgactgcaggaacggagggacctgcctcctgggcctggatggctgtgattgccccgagggctggactgggctcatctgcaatgagagttgtcctccggacacctttgggaagaactgcagcttctcctgcagctgtcagaatggtgggacctgcgactctgtcacgggggcctgccgctgccccccgggtgtcagtggaactaactgtgaggatggctgccccaagggctactatggcaagcactgtcgcaagaaatgcaactgtgccaaccggggccggtgccaccgcctctacggggcctgcctctgcgacccagggctctacggccgcttctgccacctcgcctgcccgccgtgggcctttgggccgggctgctcggaggagtgccagtgtgtgcagccccacacgcagtcctgtgacaagagggatggcagctgctcctgcaaggctggcttccggggcgagcgctgtcaggcagagtgtgagctgggctactttgggccggggtgctggcaggcatgcacctgcccagtgggcgtggcctgtgactccgtgagcggcgagtgtgggaagcggtgtcctgctggcttccagggagaggactgtggccaagagtgcccggtggggacgtttggcgtgaactgctcgagctcctgctcctgtgggggggccccctgccacggggtcacggggcagtgccggtgtccaccggggaggactggggaagactgtgaggcagattgtcccgagggccgctgggggctgggctgccaggagatctgcccagcatgccagcacgctgcccgctgcgaccctgagaccggagcctgcctgtgcctccctggcttcgtcggcagccgctgccaggacgtgtgcccagcaggctggtatggtcccagctgccagacaaggtgctcttgtgccaatgatgggcactgccacccagccaccggacactgcagctgtgcccccgggtggaccggctttagctgccagagagcctgtgatactgggcactggggacctgactgcagccacccctgcaactgcagcgctggccacgggagctgtgatgccatcagcggcctgtgtctgtgtgaggctggctacgtgggcccgcggtgcgagcagcagtgtccccagggccactttgggcccggctgtgagcagctgtgccagtgtcagcatggagcagcctgtgaccacgtcagcggggcctgcacctgcccggccggctggaggggcaccttctgcgagcatgcctgcccggccggcttctttggattggactgtcgtagtgcctgcaactgcaccgccggagctgcctgtgatgccgtgaatggctcctgcctctgccccgctggccgccggggcccccgctgtgccgagacctgccctgccggcctgtacggcgacaactgtcggcattcctgcctctgccagaacggagggacctgtgaccctgtctcaggccactgtgcgtgcccagagggctgggccggcctggcctgtgagaaggagtgccccccccgggacgtcagagctggctgccggcacagcggtggttgcctcaacgggggcctgtgtgacccgcacacgggccgctgcctctgcccagccggctgggctggggacaagtgtcagagcccctgcctgcggggctggtttggagaggcctgtgcccagcactgcagctgcccgcctggcgctgcctgccaccacgtcactggggcctgccgctgtccccctggcttcactggctccggctgcgagcagggatgtccgcccgggcggtatgggccaggctgtgaacagctgtgtgggtgtctcaacgggggctcctgtgatgcggccacgggggcctgccgctgccccactgggttcctcgggacggactgcaacctcacctgtccgcagggccgcttcggccccaactgcacccacgtgtgtgggtgtgggcagggggcggcctgcgaccctgtgaccggcacctgcctctgccccccggggagagccggcgtccgctgtgagcgaggctgcccccagaaccggtttggcgtgggctgcgagcacacctgctcctgcagaaatgggggcctgtgccacgccagcaacggcagctgctcctgtggcctgggctggacggggcggcactgcgagctggcctgtccccctgggcgctacggagccgcctgccatctggagtgctcctgccacaacaacagcacgggtgagcctgccacgggcacctgccgctgcggccccggcttctatggccaggcctgcgagcacccctgtccccctggcttccacggggctggctgccaggggttgtgctggtgtcaacatggagccccctgcgaccccatcagtggccgatgcctctgccctgccggcttccacggccacttctgtgagagggggtgtgagccaggttcatttggagagggctgccaccagcgctgtgactgtgacgggggggcaccctgtgaccctgtcaccggtctctgcctttgcccaccagggcgctcaggagccacctgtaacctggattgcagaaggggccagtttgggcccagctgcaccctgcactgtgactgcgggggtggggctgactgcgaccctgtcagtgggcagtgtcactgtgtggatggctacatggggcccacgtgccgggaaggtgggcccctccggctccccgagaacccgtccttagcccagggctcagcgggcacactgcccgcctccagcagacccacatcccggagcggtggaccagcgaggcactagtagaggcagtcccgtggagcccgcctctccagtcccagccagaggggaccctggcctttggtgaccactgagaaggacacttcacgggcccagagctcctggtactgcccttcctttgagggccgtggagggctgtggacagcccagcaacctgtcgctcttggaggctggtgtggccttgaggagggaagcctcgcatggccgctggaagagaggcgcctcctggcctggctctgcagaacccaggggcacgctctgggcctgggctgaggaagtcccgctctccccgcggctctgagttggactgaggacaggtgtgggcgccagtgtgggtgcaggcgcaggtgcaggcacagggccactgtcctccaggcaggctt

SEQ ID NO: 874 - protein, 1450 aa, Homo sapiens
MPMGHSDRWSWRLLRLALPLPVWLPAGGGRGADSPCLCSRPHVCAEQELTLVGRRQPCVQALSHTVPVWKAGCGWQAWCVGHERRTVYYMGYRQVYTTEARTVLRCCRGWTQQPDEEGCLSAECSASLCFHGGRCVPGSAQPCHCPPGFQGPRCQYDVDECRTHNGGCQHRCVNTPGSYLCECKPGFRLHTDSRTCLAINSCALGNGGCQHHCVQLTITRHRCQCRPGFQLQEDGRHCVRRSPCANRNGSCMHRCQVVRGLARCECHVGYQLAADGKACEDVDECAAGLAQCAHGCLNTQGSFKCVCHAGYELGADGRQCYRIEMEIVNSCEANNGGCSHGCSHTSAGPLCTCPRGYELDTDQRTCIRCRRLCRQPVLQQVCTNNPGGYECGCYAGYRLSADGCGCEDVDECASSRGGCEHHCTNLAGSFQCSCEAGYRLHEDRRGCSALEEPMVDLDGELPFVRPLPHIAVLQDELPQLFQDDDVGADEEEAELRGEHTLTEKFVCLDDSFGHDCSLTCDDCRNGGTCLLGLDGCDCPEGWTGLICNESCPPDTFGKNCSFSCSCQNGGTCDSVTGACRCPPGVSGTNCEDGCPKGYYGKHCRKKCNCANRGRCHRLYGACLCDPGLYGRFCHLACPPWAFGPGCSEECQCVQPHTQSCDKRDGSCSCKAGFRGERCQAECELGYFGPGCWQACTCPVGVACDSVSGECGKRCPAGFQGEDCGQECPVGTFGVNCSSSCSCGGAPCHGVTGQCRCPPGRTGEDCEADCPEGRWGLGCQEICPACQHAARCDPETGACLCLPGFVGSRCQDVCPAGWYGPSCQTRCSCANDGHCHPATGHCSCAPGWTGFSCQRACDTGHWGPDCSHPCNCSAGHGSCDAISGLCLCEAGYVGPRCEQQCPQGHFGPGCEQLCQCQHGAACDHVSGACTCPAGWRGTFCEHACPAGFFGLDCRSACNCTAGAACDAVNGSCLCPAGRRGPRCAETCPAGLYGDNCRHSCLCQNGGTCDPVSGHCACPEGWAGLACEKECPPRDVRAGCRHSGGCLNGGLCDPHTGRCLCPAGWAGDKCQSPCLRGWFGEACAQHCSCPPGAACHHVTGACRCPPGFTGSGCEQGCPPGRYGPGCEQLCGCLNGGSCDAATGACRCPTGFLGTDCNLTCPQGRFGPNCTHVCGCGQGAACDPVTGTCLCPPGRAGVRCERGCPQNRFGVGCEHTCSCRNGGLCHASNGSCSCGLGWTGRHCELACPPGRYGAACHLECSCHNNSTGEPATGTCRCGPGFYGQACEHPCPPGFHGAGCQGLCWCQHGAPCDPISGRCLCPAGFHGHFCERGCEPGSFGEGCHQRCDCDGGAPCDPVTGLCLCPPGRSGATCNLDCRRGQFGPSCTLHCDCGGGADCDPVSGQCHCVDGYMGPTCREGGPLRLPENPSLAQGSAGTLPASSRPTSRSGGPARH

SEQ ID NO: 875 - DNA, 522 bp, Homo sapiens; identical to SEQ ID NO: 861
  CDS (29)..(514)

SEQ ID NO: 876 - protein, 162 aa, Homo sapiens
MAPASAPLAAGAPAVPRPALPACTATTVGIPASARTEGPVTLSQACEHPCPPGFHGAGCQGLCWCQHGAPCDPISGRCLCPAGFHGHFCERDCRRGQFGPSCTLHCDCGGGADCDPVSGQCHCVDGYMGPTCREGGPLRLPENPSLAQGSAGTLPASSRPTS

SEQ ID NO: 877 - DNA, 7334 bp, Homo sapiens
  CDS (1)..(4209)
  misc_feature (6031)..(6031): Wherein n may be a, c, g or t
  misc_feature (7259)..(7259): Wherein n may be a, c, g or t
atgcccatgggacattctgacaggtggtcttggcgtctcctgaggctggcactgccactcccagtctggttgccggctgggggtggccgaggcgctgactctccatgtctctgttccaggccccacgtgtgtgctgagcaggagctgaccctggtgggccgccgccagccgtgcgtgcaggccttaagccacacggtgccggtgtggaaggccggctgtgggtggcaggcgtggtgcgtgggtcatgagcggaggaccgtctactacatgggctacaggcaggtgtataccacggaggcccggaccgtgctcaggtgctgccgagggtggatgcagcagcccgacgaggagggctgcctctcggatgtgggtgagtgtgccaacgccaacgggggctgtgcgggtcggtgccgggacaccgtggggggcttctactgccgctggcccccccccagccaccagctgcagggtgatggcgagacttgccaagatgtggacgaatgccgaacccacaacggtggctgccagcaccggtgcgtgaacaccccaggctcctacctctgtgagtgcaagcccggcttccggctccacactgacagcaggacctgcgccattaactcctgcgccctgggcaatggcggctgccagcaccactgtgtccagctcacaatcactcggcatcgctgccagtgccggcccgggttccagctccaggaggacggcaggcattgtgtccgtagaagcccgtgtgccaacaggaacggcagctgcatgcacaggtgccaggtggtccggggcctcgcccgctgtgagtgccacgtgggctatcagctagcagcggacggcaaggcctgtgaagatgtggacgaatgtgccgcagggctggcccagtgtgcccatggctgcctcaacacccaggggtccttcaagtgcgtgtgtcacgcgggctatgagctgggcgccgatggccggcagtgctaccgtattgagatggaaatcgtgaacagctgtgaggccaacaacggcggctgctcccatggctgcagccacaccagtgctgggcccctgtgcacctgtccccgcggctacgagctggacacagatcagaggacctgcatcagatgtcgacgactgtgcagacagcccgtgctgcagcaggtgtgcaccaacaaccctggcgggtacgagtgcggctgctacgccggctaccggctcagtgccgatggctgcggctgcgaggatgtggatgagtgcgcctccagccgtggcggctgcgagcaccactgcaccaacctggccggctccttccagtgctcctgcgaggccggctaccggctgcacgaggaccgtaggggctgcagcgccctggaggagccgatggtggacctggacggcgagctgcctttcgtgcggcccctgccccacattgccgtgctccaggacgagctgccgcaactcttccaggatgacgacgtcggggccgatgaggaagaggcagagttgcggggcgaacacacgctcacagagaagtttgtctgcctggatgactcctttggccatgactgcagcttgacctgtgatgactgcaggaacggagggacctgcctcctgggcctggatggctgtgattgccccgagggctggactgggctcatctgcaatgagagttgtcctccggacacctttgggaagaactgcagcttctcctgcagctgtcagaatggtgggacctgcgactctgtcacgggggcctgccgctgccccccgggtgtcagtggaactaactgtgaggatggctgccccaagggctactatggcaagcactgtcgcaagaaatgcaactgtgccaaccggggccggtgccaccgcctctacggggcctgcctctgcgacccagggctctacggccgcttctgccacctcgcctgcccgccgtgggcctttgggccgggctgctcggaggagtgccagtgtgtgcagccccacacgcagtcctgtgacaagagggatggcagctgctcctgcaaggctggcttccggggcgagcgctgtcaggcagagtgtgagccgggctactttgggccggggtgctggcaggcatgcacctgcccagtgggcgtggcctgtgactccgtgagcggcgagtgtgggaagcggtgtcctgctggcttccagggagaggactgtggccaagagtgcccggtggggacctttggcgtgaactgctcgagctcctgctcctgtgggggggccccctgccacggggtcacggggcagtgccggtgtccgccggggaggactggggaagactgtgaggcaggtgagtgtgagggcctctgggggctgggctgccaggagatctgcccagcatgccataacgctgctcgctgcgaccctgagaccggagcctgcctgtgcctccctggctttgtcggcagccgctgccaggactgtgaggcaggctggtatggtcccagctgccagacaatgtgctcttgtgccaatgatgggcactgccaccaagacacgggacactgcagctgtgcccccgggtggaccggctttagctgccagagagcctgtgatactgggcactggggacctgactgcagccacccctgcaactgcagcgctggccacgggagctgtgatgccatcagcggcctgtgtctgtgtgaggctggctacgtgggcccgcggtgcgagcagtcagagtgtccccagggccactttgggcccggctgtgagcagcggtgccagtgtcagcatggagcagcctgtgaccacgtcagcggggcctgcacctgcccggccggctggaggggcaccttctgcgagcatgcctgcccggccggcttctttggattggactgtcgcagtgcctgcaactgcaccgccggagctgcctgtgatgccgtgaatggctcctgcctctgccccgctggccgccggggcccccgctgtgccgagacctgcccagcccacacctacgggcacaattgcagccaggcctgtgcctgctttaacggggcctcctgtgaccctgtccacgggcagtgccactgtgcccctggctggatggggccctcctgcctgcaggcctgccctgccggcctgtacggcgacaactgtcggcattcctgcctctgccagaacggagggacctgtgaccctgtctcaggccactgtgcgtgcccagagggctgggccggcctggcctgtgaggtagagtgcctcccccgggacgtcagagctggctgccggcacagcggcggttgcctcaacgggggcctgtgtgacccgcacacgggccgctgcctctgcccagccggctggactggggacaagtgtcagagccctgcagcctgtgccaagggcacattcgggcctcactgtgaggggcgctgtgcctgccggtggggaggcccctgccaccttgccaccggggcctgcctctgccctccggggtggcgggggcctcatctttctgcagcctgcctgcggggctggtttggagaggcctgtgcccagcgctgcagctgcccgcctggcgctgcctgccaccacgtcactggggcctgccgctgtccccctggcttcactggctccggctgcgagcaggcctgcccacccggcagctttggggaggactgtgcgcagatgtgccagtgtcccggtgagaacccggcctgccaccctgccaccgggacctgctcatgtgctgctggctaccacggccccagctgccagcaacgatgtccgcccgggcggtatgggccaggctgtgaacagctgtgtgggtgtctcaacgggggctcctgtgatgcggccacgggggcctgccgctgccccactgggttcctcgggacggactgcaacctcacctgtccgcagggccgcttcggccccaactgcacccacgtgtgtgggtgtgggcagggggcggcctgcgaccctgtgaccggcacctgcctctgccccccggggagagccggcgtccgctgtgagcgaggctgcccccagaaccggtttggcgtgggctgcgagcacacctgctcctgcagaaatgggggcctgtgccacgccagcaagcggcagctgctcctgtggcctgggctggacggggcggcactgcgagctggcctgtccccctgggcgctacggagccgcctgccatctggagtgctcctgccacaacaacagcacgtgtgagcctgccacgggcacctgccgctgcggccccggcttctatggccaggcctgcgagcacccctgtccccctggcttccacggggctggctgccaggggttgtgctggtgtcaacatggagccccctgcgaccccatcagtggccgatgcctctgccctgccggcttccacggccacttctgtgagagggggtgtgagccaggttcatttggagagggctgccaccagcgctgtgactgtgacgggggggcaccctgtgaccctgtcaccggtctctgcctttgcccaccagggcgctcaggagccacctgtaacctggattgcagaaggggccagtttgggcccagctgcaccctgcactgtgactgcgggggtggggctgactgcgaccctgtcagtgggcagtgtcactgtgtggatggctacatggggcccacgtgccgggaaggtgggcccctccggctccccgagaacccgtccttagcccagggctcagcgggcacactgcccgcctccagcagacccacatcccggagcggtggaccagcgaggcactagtagaggcagtcccgtggagcccgcctctccagtcccagccagaggggaccctggcctttggtgaccactgagaaggacacttcacgggcccagagctcctggtactgcccttcctttgagggccgtggagggctgtggacagcccagcaacctgtcgctcttggaggctggtgtggccttgaggagggaagcctcgcatggccgctggaagagaggcgcctcctggcctggctctgcagaacccaggggcacgctctgggcctgggctgaggaagtcccgctctccccgcggctctgagttggactgaggacaggtgtgggcgccagtgtgggtgcaggcgcaggtgcaggcacagggccactgtcctccaggcaggctttttggtgctaggccctgggactggaagtcgcccagcccgtatttatgtaaaggtatttatgggccactgcacatgcccgctgcagccctgggatcagctggaagctgcctgtcatctcctgcccaatccccagaaaccctgattcaggtctgcaggctcctgcgggctcaccaggctgctggctccggtaccatgtaaacctaggaaggtaaaggagcaggcaacctcctcgtggcctgtgtgtttgctgtgttacgtggactctgtgtgggctcctccctggggcccggccagcataacggtgcacccagggacctcccagtgcacccggggccctttgcaggggtgggggtgccacacaagtgaagaagttgggactcatctcagttcccagtgctattgaggagaacgctggggctgcattcattaccgctgagacccagagactggctgttcccagagaatggcccagggggaggagggctggtgtggaggggcaacctggactgaggccgaactcccttgggctcaccccacccacccctacctgagcatcagcagtggggggagggcagcatcgcaggggcagggactccctgggtgaggacagaccagccctcccgagcacctggcactcatgggctgaggctgacttctcctggaagaagggcccagagtggaaggaagaggcagagggtagaggtggtggctgggggctcctctgcagagtggggtggccaatggagagggctgcactcacaccgcaacataggactctctctcccttaagaaggcccccttagggtctgggctgccgcccccatcaccctaaaaccagccaaggtagctgaggccccagggcagacaatttcaccagcaggangaggaggagtccagtgagcttggttgctcacagacagcaagggagctgtcacagaggaagctgatgaatggaccgctgtggggagactttaaagtagaacagtgataagggagggcaggatggtggggatgcagaagcagcagccagagagagacggactggggtgcagacggagtgtggaaaacgcataccttgaaatgaagcatccagcagatggggtgagtggatacagctcaggagattctcccaggaatagcagggaggcgtaaagagagacaacgtacagagatagatgaatggaaatgggtaagggaggtgttcattcacatccatctaactgcaaaatacaaaagtaagaagtcattgacatgaagcaacgacgaccaagacgttctcagatctaaaggtgaatgatctcagtcagcctggaaatgcacaaggtggaaaaataacataaaaaagccataagaccttgaagaacatcaatgtcaaagataaattctaaagtcccagagaaaaaagaatgggaatcaaattgacctcagactatacgtgagaaacacggagagccagaaaactgtgatgttccatcctcagagtttgaaggaaatatttgaaggctgaattttacatccagctaaactatcaaaggcatgcaaagtccatgttattcttaggccttcaaggcctcggccatttttctacagaaaagcctgattttaaaatgctcttagagacgttctccagccagaagagaaagaagccaggagggtgctctgagatattcagtcaccacagttcccaaatggcctaggaattcagagagtcagaatatcaccattactccccaatgggaacccccgacagtctcagcatggtgtgagggtgtggacggggggcctggcaggtaccaatcactcatcccgctcagtgaagacacagtgttcagctacggaagccataaggcaggccgagcttctgcccatccggaggaaatctcagctatccaacggcggtcaggagcagaggaaaataaagcagaataactagaaaacacgctcacagatcctaatgttaacggttacaaatgacgacggaaaaacaaactcctgaccatatattatatagtttcaagcagcaagaaggaggatattgaacattctcaacacacataataaacgcttgagatgatgatatgctcattaccctgatttgatcactagacatnccatgtatcaaaacatcactgtgtatccgatgaatatctacaattattgtcaattaaaaacatcattaaaaacaa

SEQ ID NO: 878 - protein, 1403 aa, Homo sapiens
MPMGHSDRWSWRLLRLALPLPVWLPAGGGRGADSPCLCSRPHVCAEQELTLVGRRQPCVQALSHTVPVWKAGCGWQAWCVGHERRTVYYMGYRQVYTTEARTVLRCCRGWMQQPDEEGCLSDVGECANANGGCAGRCRDTVGGFYCRWPPPSHQLQGDGETCQDVDECRTHNGGCQHRCVNTPGSYLCECKPGFRLHTDSRTCAINSCALGNGGCQHHCVQLTITRHRCQCRPGFQLQEDGRHCVRRSPCANRNGSCMHRCQVVRGLARCECHVGYQLAADGKACEDVDECAAGLAQCAHGCLNTQGSFKCVCHAGYELGADGRQCYRIEMEIVNSCEANNGGCSHGCSHTSAGPLCTCPRGYELDTDQRTCIRCRRLCRQPVLQQVCTNNPGGYECGCYAGYRLSADGCGCEDVDECASSRGGCEHHCTNLAGSFQCSCEAGYRLHEDRRGCSALEEPMVDLDGELPFVRPLPHIAVLQDELPQLFQDDDVGADEEEAELRGEHTLTEKFVCLDDSFGHDCSLTCDDCRNGGTCLLGLDGCDCPEGWTGLICNESCPPDTFGKNCSFSCSCQNGGTCDSVTGACRCPPGVSGTNCEDGCPKGYYGKHCRKKCNCANRGRCHRLYGACLCDPGLYGRFCHLACPPWAFGPGCSEECQCVQPHTQSCDKRDGSCSCKAGFRGERCQAECEPGYFGPGCWQACTCPVGVACDSVSGECGKRCPAGFQGEDCGQECPVGTFGVNCSSSCSCGGAPCHGVTGQCRCPPGRTGEDCEAGECEGLWGLGCQEICPACHNAARCDPETGACLCLPGFVGSRCQDCEAGWYGPSCQTMCSCANDGHCHQDTGHCSCAPGWTGFSCQRACDTGHWGPDCSHPCNCSAGHGSCDAISGLCLCEAGYVGPRCEQSECPQGHFGPGCEQRCQCQHGAACDHVSGACTCPAGWRGTFCEHACPAGFFGLDCRSACNCTAGAACDAVNGSCLCPAGRRGPRCAETCPAHTYGHNCSQACACFNGASCDPVHGQCHCAPGWMGPSCLQACPAGLYGDNCRHSCLCQNGGTCDPVSGHCACPEGWAGLACEVECLPRDVRAGCRHSGGCLNGGLCDPHTGRCLCPAGWTGDKCQSPAACAKGTFGPHCEGRCACRWGGPCHLATGACLCPPGWRGPHLSAACLRGWFGEACAQRCSCPPGAACHHVTGACRCPPGFTGSGCEQACPPGSFGEDCAQMCQCPGENPACHPATGTCSCAAGYHGPSCQQRCPPGRYGPGCEQLCGCLNGGSCDAATGACRCPTGFLGTDCNLTCPQGRFGPNCTHVCGCGQGAACDPVTGTCLCPPGRAGVRCERGCPQNRFGVGCEHTCSCRNGGLCHASKRQLLLWPGLDGAALRAGLSPWALRSRLPSGVLLPQQQHV

SEQ ID NO: 879 - DNA, 4783 bp, Homo sapiens
  CDS (1)..(3594)
atgcccatgggacattctgacaggtggtcttggcgtctcctgaggctggcactgccactcccagtctggttgccggctgggggtggccgaggcgctgactctccatgtctctgttccaggccccacgtgtgtgctgagcaggagctgaccctggtgggccgccgccagccgtgcgtgcaggccttaagccacacggtgccggtgtggaaggccggctgtgggtggcaggcgtggtgcgtgggtcatgagcggagaaccgtctactacatgggctacaggcaggtgtataccacggaggcccggaccgtgctcaggtgctgccgagggtggacgcagcagcccgacgaggagggctgcctctcggctgaatgcagcgccagcctctgttttcacggtggccgttgtgtgccaggctcagcccagccgtgtcactgtccccccggcttccagggaccccgctgtcagtatgatgtggacgaatgccgaacccacaacggtggctgccagcaccggtgcgtgaacaccccaggctcctacctctgtgagtgcaagcccggcttccggctccacactgacagcaggacctgcctggccattaactcctgcgccctgggcaatggcggctgccagcaccactgtgtccagctcacaatcactcggcatcgctgccagtgccggcccgggttccagctccaggaggacggcaggcattgtgtccgtagaagcccgtgtgccaacaggaacggcagctgcatgcacaggtgccaggtggtccggggcctcgcccgctgtgagtgccacgtgggctatcagctagcagcggacggcaaggcctgtgaagatgtggacgaatgtgccgcagggctggcccagtgtgcccatggctgcctcaacacccaggggtccttcaagtgcgtgtgtcacgcgggctatgagctgggcgccgatggccggcagtgctaccgtattgagatggaaatcgtgaacagctgtgaggccaacaacggcggctgctcccatggctgcagccacaccagtgctgggcccctgtgcacctgtccccgcggctacgagctggacacagatcagaggacctgcatcagatgtcgacgactgtgcagacagcccgtgctgcagcaggtgtgcaccaacaaccctggcgggtacgagtgcggctgctacgccggctaccggctcagtgccgatggctgcggctgcgaggatgtggatgagtgcgcctccagccgtggcggctgcgagcaccactgcaccaacctggccggctccttccagtgctcctgcgaggccggctaccggctgcacgaggaccgtaggggctgcagcgccctggaggagccgatggtggacctggacggcgagctgcctttcgtgcggcccctgccccacattgccgtgctccaggacgagctgccgcaactcttccaggatgacgacgtcggggccgatgaggaagaggcagagttgcggggcgaacacacgctcacagagaagtttgtctgcctggatgactcctttggccatgactgcagcttgacctgtgatgactgcaggaacggagggacctgcctcctgggcctggatggctgtgattgccccgagggctggactgggctcatctgcaatgagagttgtcctccggacacctttgggaagaactgcagcttctcctgcagctgtcagaatggtgggacctgcgactctgtcacgggggcctgccgctgccccccgggtgtcagtggaactaactgtgaggatggctgccccaagggctactatggcaagcactgtcgcaagaaatgcaactgtgccaaccggggccggtgccaccgcctctacggggcctgcctctgcgacccagggctctacggccgcttctgccacctcgcctgcccgccgtgggcctttgggccgggctgctcggaggagtgccagtgtgtgcagccccacacgcagtcctgtgacaagagggatggcagctgctcctgcaaggctggcttccggggcgagcgctgtcaggcagagtgtgagctgggctactttgggccggggtgctggcaggcatgcacctgcccagtgggcgtggcctgtgactccgtgagcggcgagtgtgggaagcggtgtcctgctggcttccagggagaggactgtggccaagagtgcccggtggggacgtttggcgtgaactgctcgagctcctgctcctgtgggggggccccctgccacggggtcacggggcagtgccggtgtccaccggggaggactggggaagactgtgaggcagattgtcccgagggccgctgggggctgggctgccaggagatctgcccagcatgccagcacgctgcccgctgcgaccctgagaccggagcctgcctgtgcctccctggcttcgtcggcagccgctgccaggacgtgtgcccagcaggctggtatggtcccagctgccagacaaggtgctcttgtgccaatgatgggcactgccacccagccaccggacactgcagctgtgcccccgggtggaccggctttagctgccagagagcctgtgatactgggcactggggacctgactgcagccacccctgcaactgcagcgctggccacgggagctgtgatgccatcagcggcctgtgtctgtgtgaggctggctacgtgggcccgcggtgcgagcagcagtgtccccagggccactttgggcccggctgtgagcagctgtgccagtgtcagcatggagcagcctgtgaccacgtcagcggggcctgcacctgcccggccggctggaggggcaccttctgcgagcatgcctgcccggccggcttctttggattggactgtcgtagtgcctgcaactgcaccgccggagctgcctgtgatgccgtgaatggctcctgcctctgccccgctggccgccggggcccccgctgtgccgagacctgccctgccggcctgtacggcgacaactgtcggcattcctgcctctgccagaacggagggacctgtgaccctgtctcaggccactgtgcgtgcccagagggctgggccggcctggcctgtgagaaggagtgccccccccgggacgtcagagctggctgccggcacagcggcggttgcctcaacgggggcctgtgtgacccgcacacgggccgctgcctctgcccagccggctggactggggacaagtgtcagagccatccccacgggcccctcctagaagcctccgcagccctcatctttctgcagcctgcctgcggggctggtttggagaggcctgtgcccagcgctgcagctgcccgcctgccgctgcctgccaccacgtcactggggcctgccgctgtccccctggcttcactggctccggctgcgagcagggatgtccgcccgggcggtatgggccaggctgtgaacagctgtgtgggtgtctcaacgggggctcctgtgatgcggccacgggggcctgccgctgccccactgggttcctcgggacggactgcaacctcacctgtccgcagggccgcttcggccccaactgcacccacgtgtgtggttgtgggcagggggcggcctgcgaccctgtgaccggcacctgcctctgccccccggggagagccggcgtccgctgtgagcgaggctgcccccagaaccggtttggcgtgggctgcgagcacacctgctcctgcagaaatgggggcctgtgccacgccagcaacggcagctgctcctgtggcctgggctggacggggcggcactgcgagctggcctgtccccctgggcgctacggagccgcctgccatctggagtgctcctgccacaacaacagcacgggtgagcctgccacgggcacctgccgctgcggccccggcttctatggccaggcctgcgagcacccctgtccccctggcttccacggggctggctgccaggggttgtgctggtgtcaacatggagccccctgcgaccccatcagtggccgatgcctctgccctgccggcttccacggccacttctgtgagagggggtgtgagccaggttcatttggagagggctgccaccagcgctgtgactgtgacgggggggcaccctgtgaccctgtcaccggtctctgcctttgcccaccagggcgctcaggagccacctgtaacctggattgcagaaggggccagtttgggcccagctgcaccctgcactgtgactgcgggggtggggctgactgcgaccctgtcagtgggcagtgtcactgtgtggatggctacatggggcccacgtgccgggaaggtgggcccctccggctccccgagaacccgtccttagcccagggctcagcgggcacactgcccgcctccagcagacccacatcccggagcggtggaccagcgaggcactagtagaggcagtcccgtggagcccgcctctccagtcccagccagaggggaccctggcctttggtgaccactgagaaggacacttcacgggcccagagctcctggtactgcccttcctttgagggccgtggagggctgtggacagcccagcaacctgtcgctcttggaggctggtgtggccttgaggagggaagcctcgcatggccgctggaagagaggcgcctcctggcctggctctgcagaacccaggggcacgctctgggcctgggctgaggaagtcccgctctccccgcggctctgagttggactgaggacaggtgtgggcgccagtgtgggtgcaggcgcaggtgcaggcacagggccactgtcctccaggcaggctt

SEQ ID NO: 880 - protein, 1198 aa, Homo sapiens
MPMGHSDRWSWRLLRLALPLPVWLPAGGGRGADSPCLCSRPHVCAEQELTLVGRRQPCVQALSHTVPVWKAGCGWQAWCVGHERRTVYYMGYRQVYTTEARTVLRCCRGWTQQPDEEGCLSAECSASLCFHGGRCVPGSAQPCHCPPGFQGPRCQYDVDECRTHNGGCQHRCVNTPGSYLCECKPGFRLHTDSRTCLAINSCALGNGGCQHHCVQLTITRHRCQCRPGFQLQEDGRHCVRRSPCANRNGSCMHRCQVVRGLARCECHVGYQLAADGKACEDVDECAAGLAQCAHGCLNTQGSFKCVCHAGYELGADGRQCYRIEMEIVNSCEANNGGCSHGCSHTSAGPLCTCPRGYELDTDQRTCIRCRRLCRQPVLQQVCTNNPGGYECGCYAGYRLSADGCGCEDVDECASSRGGCEHHCTNLAGSFQCSCEAGYRLHEDRRGCSALEEPMVDLDGELPFVRPLPHIAVLQDELPQLFQDDDVGADEEEAELRGEHTLTEKFVCLDDSFGHDCSLTCDDCRNGGTCLLGLDGCDCPEGWTGLICNESCPPDTFGKNCSFSCSCQNGGTCDSVTGACRCPPGVSGTNCEDGCPKGYYGKHCRKKCNCANRGRCHRLYGACLCDPGLYGRFCHLACPPWAFGPGCSEECQCVQPHTQSCDKRDGSCSCKAGFRGERCQAECELGYFGPGCWQACTCPVGVACDSVSGECGKRCPAGFQGEDCGQECPVGTFGVNCSSSCSCGGAPCHGVTGQCRCPPGRTGEDCEADCPEGRWGLGCQEICPACQHAARCDPETGACLCLPGFVGSRCQDVCPAGWYGPSCQTRCSCANDGHCHPATGHCSCAPGWTGFSCQRACDTGHWGPDCSHPCNCSAGHGSCDAISGLCLCEAGYVGPRCEQQCPQGHFGPGCEQLCQCQHGAACDHVSGACTCPAGWRGTFCEHACPAGFFGLDCRSACNCTAGAACDAVNGSCLCPAGRRGPRCAETCPAGLYGDNCRHSCLCQNGGTCDPVSGHCACPEGWAGLACEKECPPRDVRAGCRHSGGCLNGGLCDPHTGRCLCPAGWTGDKCQSHPHGPLLEASAALIFLQPACGAGLERPVPSAAAARLPLPATTSLGPAAVPLASLAPAASRDVRPGGMGQAVNSCVGVSTGAPVMRPRGPAAAPLGSSGRTATSPVRRAASAPTAPTCVVVGRGRPATL

SEQ ID NO: 881 - DNA, 4835 bp, Homo sapiens
  CDS (1)..(4731)
atgtcgttccttgaagaggcgagggcagcggggcgcgcggtggtcctggcgttggtgctgctgctgctccccgccgtgcccgtgggcgccagcgttccgccgcggcccctgctcccgctgcagcccggcatgccccacgtgtgtgctgagcaggagctgaccctggtgggccgccgccagccgtgcgtgcaggccttaagccacacggtgccggtgtggaaggccggctgtgggtggcaggcgtggtgcgtgggtcatgagcggaggaccgtctactacatgggctacaggcaggtgtataccacggaggcccggaccgtgctcaggtgctgccgagggtggatgcagcagcccgacgaggagggctgcctctcggatgtgggtgagtgtgccaacgccaacgggggctgtgcgggtcggtgccgggacaccgtggggggcttctactgccgctggcccccccccagccaccagctgcagggtgatggcgagacttgccaagatgtggacgaatgccgaacccacaacggtggctgccagcaccggtgcgtgaacaccccaggctcctacctctgtgagtgcaagcccggcttccggctccacactgacagcaggacctgcgccattaactcctgcgccctgggcaatggcggctgccagcaccactgtgtccagctcacaatcactcggcatcgctgccagtgccggcccgggttccagctccaggaggacggcaggcattgtgtccgtagaagcccgtgtgccaacaggaacggcagctgcatgcacaggtgccaggtggtccggggcctcgcccgctgtgagtgccacgtgggctatcagctagcagcggacggcaaggcctgtgaagatgtggacgaatgtgccgcagggctggcccagtgtgcccatggctgcctcaacacccaggggtccttcaagtgcgtgtgtcacgcgggctatgagctgggcgccgatggccggcagtgctaccgtattgagatggaaatcgtgaacagctgtgaggccaacaacggcggctgctcccatggctgcagccacaccagtgctgggcccctgtgcacctgtccccgcggctacgagctggacacagatcagaggacctgcatcagatgtcgacgactgtgcagacagcccgtgctgcagcaggtgtgcaccaacaaccctggcgggtacgagtgcggctgctacgccggctaccggctcagtgccgatggctgcggctgcgaggatgtggatgagtgcgcctccagccgtggcggctgcgagcaccactgcaccaacctggccggctccttccagtgctcctgcgaggccggctaccggctgcacgaggaccgtaggggctgcagcgccctggaggagccgatggtggacctggacggcgagctgcctttcgtgcggcccctgccccacattgccgtgctccaggacgagctgccgcaactcttccaggatgacgacgtcggggccgatgaggaagaggcagagttgcggggcgaacacacgctcacagagaagtttgtctgcctggatgactcctttggccatgactgcagcttgacctgtgatgactgcaggaacggagggacctgcctcctgggcctggatggctgtgattgccccgagggctggactgggctcatctgcaatgagagttgtcctccggacacctttgggaagaactgcagcttctcctgcagctgtcagaatggtgggacctgcgactctgtcacgggggcctgccgctgccccccgggtgtcagtggaactaactgtgaggatggctgccccaagggctactatggcaagcactgtcgcaagaaatgcaactgtgccaaccggggccggtgccaccgcctctacggggcctgcctctgcgacccagggctctacggccgcttctgccacctcgcctgcccgccgtgggcctttgggccgggctgctcggaggagtgccagtgtgtgcagccccacacgcagtcctgtgacaagagggatggcagctgctcctgcaaggctggcttccggggcgagcgctgtcaggcagagtgtgagccgggctactttgggccggggtgctggcaggcatgcacctgcccagtgggcgtggcctgtgactccgtgagcggcgagtgtgggaagcggtgtcctgctggcttccagggagaggactgtggccaagagtgcccggtggggacctttggcgtgaactgctcgagctcctgctcctgtgggggggccccctgccacggggtcacggggcagtgccggtgtccgccggggaggactggggaagactgtgaggcaggtgagtgtgagggcctctgggggctgggctgccaggagatctgcccagcatgccataacgctgctcgctgcgaccctgagaccggagcctgcctgtgcctccctggctttgtcggcagccgctgccaggactgtgaggcaggctggtatggtcccagctgccagacaatgtgctcttgtgccaatgatgggcactgccaccaagacacgggacactgcagctgtgcccccgggtggaccggctttagctgccagagagcctgtgatactgggcactggggacctgactgcagccacccctgcaactgcagcgctggccacgggagctgtgatgccatcagcggcctgtgtctgtgtgaggctggctacgtgggcccgcggtgcgagcagtcagagtgtccccagggccactttgggcccggctgtgagcagcggtgccagtgtcagcatggagcagcctgtgaccacgtcagcggggcctgcacctgcccggccggctggaggggcaccttctgcgagcatgcctgcccggccggcttctttggattggactgtcgcagtgcctgcaactgcaccgccggagctgcctgtgatgccgtgaatggctcctgcctctgccccgctggccgccggggcccccgctgtgccgagagtgcctgcccagcccacacctacgggcacaattgcagccaggcctgtgcctgctttaacggggcctcctgtgaccctgtccacgggcagtgccactgtgcccctggctggatggggccctcctgcctgcaggcctgccctgccggcctgtacggcgacaactgtcggcattcctgcctctgccagaacggagggacctgtgaccctgtctcaggccactgtgcgtgcccagagggctgggccggcctggcctgtgaggtagagtgcctcccccgggacgtcagagctggctgccggcacagcggcggttgcctcaacgggggcctgtgtgacccgcacacgggccgctgcctctgcccagccggctggactggggacaagtgtcagagccctgcagcctgtgccaagggcacattcgggcctcactgtgaggggcgctgtgcctgccggtggggaggcccctgccaccttgccaccggggcctgcctctgccctccggggtggcgggggcctcatctttctgcagcctgcctgcggggctggtttggagaggcctgtgcccagcgctgcagctgcccgcctggcgctgcctgccaccacgtcactggggcctgccgctgtccccctggcttcactggctccggctgcgagcaggcctgcccacccggcagctttggggaggactgtgcgcagatgtgccagtgtcccggtgagaacccggcctgccaccctgccaccgggacctgctcatgtgctgctggctaccacggccccagctgccagcaacgatgtccgcccgggcggtatgggccaggctgtgaacagctgtgtgggtgtctcaacgggggctcctgtgatgcggccacgggggcctgccgctgccccactgggttcctcgggacggactgcaacctcacctgtccgcagggccgcttcggccccaactgcacccacgtgtgtgggtgtgggcagggggcggcctgcgaccctgtgaccggcacctgcctctgccccccggggagagccggcgtccgctgtgagcgaggctgcccccagaaccggtttggcgtgggctgcgagcacacctgctcctgcagaaatgggggcctgtgccacgccagcaacggcagctgctcctgtggcctgggctggacggggcggcactgcgagctggcctgtccccctgggcgctacggagccgcctgccatctggagtgctcctgccacaacaacagcacgtgtgagcctgccacgggcacctgccgctgcggccccggcttctatggccaggcctgcgagcacccctgtccccctggcttccacggggctggctgccaggggttgtgctggtgtcaacatggagccccctgcgaccccatcagtggccgatgcctctgccctgccggcttccacggccacttctgtgagagggggtgtgagccaggttcatttggagagggctgccaccagcgctgtgactgtgacgggggggcaccctgtgaccctgtcaccggtctctgcctttgcccaccagggcgctcaggagccacctgtaacctggattgcagaaggggccagtttgggcccagctgcaccctgcactgtgactgcgggggtggggctgactgcgaccctgtcagtgggcagtgtcactgtgtggatggctacatggggcccacgtgccgggaagcgggcacactgcccgcctccagcagacccacatcccggagcggtggaccagcgaggcactagtagaggcagtcccgtggagcccgcctctccagtcccagccagaggggaccctggcctttggtgaccactgagaaggacacttcacgggcccagagctcctg

SEQ ID NO: 882 - protein, 1577 aa, Homo sapiens
MSFLEEARAAGRAVVLALVLLLLPAVPVGASVPPRPLLPLQPGMPHVCAEQELTLVGRRQPCVQALSHTVPVWKAGCGWQAWCVGHERRTVYYMGYRQVYTTEARTVLRCCRGWMQQPDEEGCLSDVGECANANGGCAGRCRDTVGGFYCRWPPPSHQLQGDGETCQDVDECRTHNGGCQHRCVNTPGSYLCECKPGFRLHTDSRTCAINSCALGNGGCQHHCVQLTITRHRCQCRPGFQLQEDGRHCVRRSPCANRNGSCMHRCQVVRGLARCECHVGYQLAADGKACEDVDECAAGLAQCAHGCLNTQGSFKCVCHAGYELGADGRQCYRIEMEIVNSCEANNGGCSHGCSHTSAGPLCTCPRGYELDTDQRTCIRCRRLCRQPVLQQVCTNNPGGYECGCYAGYRLSADGCGCEDVDECASSRGGCEHHCTNLAGSFQCSCEAGYRLHEDRRGCSALEEPMVDLDGELPFVRPLPHIAVLQDELPQLFQDDDVGADEEEAELRGEHTLTEKFVCLDDSFGHDCSLTCDDCRNGGTCLLGLDGCDCPEGWTGLICNESCPPDTFGKNCSFSCSCQNGGTCDSVTGACRCPPGVSGTNCEDGCPKGYYGKHCRKKCNCANRGRCHRLYGACLCDPGLYGRFCHLACPPWAFGPGCSEECQCVQPHTQSCDKRDGSCSCKAGFRGERCQAECEPGYFGPGCWQACTCPVGVACDSVSGECGKRCPAGFQGEDCGQECPVGTFGVNCSSSCSCGGAPCHGVTGQCRCPPGRTGEDCEAGECEGLWGLGCQEICPACHNAARCDPETGACLCLPGFVGSRCQDCEAGWYGPSCQTMCSCANDGHCHQDTGHCSCAPGWTGFSCQRACDTGHWGPDCSHPCNCSAGHGSCDAISGLCLCEAGYVGPRCEQSECPQGHFGPGCEQRCQCQHGAACDHVSGACTCPAGWRGTFCEHACPAGFFGLDCRSACNCTAGAACDAVNGSCLCPAGRRGPRCAESACPAHTYGHNCSQACACFNGASCDPVHGQCHCAPGWMGPSCLQACPAGLYGDNCRHSCLCQNGGTCDPVSGHCACPEGWAGLACEVECLPRDVRAGCRHSGGCLNGGLCDPHTGRCLCPAGWTGDKCQSPAACAKGTFGPHCEGRCACRWGGPCHLATGACLCPPGWRGPHLSAACLRGWFGEACAQRCSCPPGAACHHVTGACRCPPGFTGSGCEQACPPGSFGEDCAQMCQCPGENPACHPATGTCSCAAGYHGPSCQQRCPPGRYGPGCEQLCGCLNGGSCDAATGACRCPTGFLGTDCNLTCPQGRFGPNCTHVCGCGQGAACDPVTGTCLCPPGRAGVRCERGCPQNRFGVGCEHTCSCRNGGLCHASNGSCSCGLGWTGRHCELACPPGRYGAACHLECSCHNNSTCEPATGTCRCGPGFYGQACEHPCPPGFHGAGCQGLCWCQHGAPCDPISGRCLCPAGFHGHFCERGCEPGSFGEGCHQRCDCDGGAPCDPVTGLCLCPPGRSGATCNLDCRRGQFGPSCTLHCDCGGGADCDPVSGQCHCVDGYMGPTCREAGTLPASSRPTSRSGGPARH

SEQ ID NO: 883 - DNA, 5000 bp, Homo sapiens; identical to SEQ ID NO: 865
  CDS (169)..(4899)

SEQ ID NO: 884 - protein, 1577 aa, Homo sapiens; identical to SEQ ID NO: 882

SEQ ID NO: 885 - DNA, 5005 bp, Homo sapiens; identical to SEQ ID NO: 867
  CDS (258)..(4898)

SEQ ID NO: 886 - protein, 1547 aa, Homo sapiens
SVPPRPLLPLQPGMPHVCAEQELTLVGRRQPCVQALSHTVPVWKAGCGWQAWCVGHERRTVYYMGYRQVYTTEARTVLRCCRGWMQQPDEEGCLSDVGECANANGGCAGRCRDTVGGFYCRWPPPSHQLQGDGETCQDVDECRTHNGGCQHRCVNTPGSYLCECKPGFRLHTDSRTCAINSCALGNGGCQHHCVQLTITRHRCQCRPGFQLQEDGRHCVRRSPCANRNGSCMHRCQVVRGLARCECHVGYQLAADGKACEDVDECAAGLAQCAHGCLNTQGSFKCVCHAGYELGADGRQCYRIEMEIVNSCEANNGGCSHGCSHTSAGPLCTCPRGYELDTDQRTCIRCRRLCRQPVLQQVCTNNPGGYECGCYAGYRLSADGCGCEDVDECASSRGGCEHHCTNLAGSFQCSCEAGYRLHEDRRGCSALEEPMVDLDGELPFVRPLPHIAVLQDELPQLFQDDDVGADEEEAELRGEHTLTEKFVCLDDSFGHDCSLTCDDCRNGGTCLLGLDGCDCPEGWTGLICNESCPPDTFGKNCSFSCSCQNGGTCDSVTGACRCPPGVSGTNCEDGCPKGYYGKHCRKKCNCANRGRCHRLYGACLCDPGLYGRFCHLACPPWAFGPGCSEECQCVQPHTQSCDKRDGSCSCKAGFRGERCQAECEPGYFGPGCWQACTCPVGVACDSVSGECGKRCPAGFQGEDCGQECPVGTFGVNCSSSCSCGGAPCHGVTGQCRCPPGRTGEDCEAGECEGLWGLGCQEICPACHNAARCDPETGACLCLPGFVGSRCQDCEAGWYGPSCQTMCSCANDGHCHQDTGHCSCAPGWTGFSCQRACDTGHWGPDCSHPCNCSAGHGSCDAISGLCLCEAGYVGPRCEQSECPQGHFGPGCEQRCQCQHGAACDHVSGACTCPAGWRGTFCEHACPAGFFGLDCRSACNCTAGAACDAVNGSCLCPAGRRGPRCAESACPAHTYGHNCSQACACFNGASCDPVHGQCHCAPGWMGPSCLQACPAGLYGDNCRHSCLCQNGGTCDPVSGHCACPEGWAGLACEVECLPRDVRAGCRHSGGCLNGGLCDPHTGRCLCPAGWTGDKCQSPAACAKGTFGPHCEGRCACRWGGPCHLATGACLCPPGWRGPHLSAACLRGWFGEACAQRCSCPPGAACHHVTGACRCPPGFTGSGCEQACPPGSFGEDCAQMCQCPGENPACHPATGTCSCAAGYHGPSCQQRCPPGRYGPGCEQLCGCLNGGSCDAATGACRCPTGFLGTDCNLTCPQGRFGPNCTHVCGCGQGAACDPVTGTCLCPPGRAGVRCERGCPQNRFGVGCEHTCSCRNGGLCHASNGSCSCGLGWTGRHCELACPPGRYGAACHLECSCHNNSTCEPATGTCRCGPGFYGQACEHPCPPGFHGAGCQGLCWCQHGAPCDPISGRCLCPAGFHGHFCERGCEPGSFGEGCHQRCDCDGGAPCDPVTGLCLCPPGRSGATCNLDCRRGQFGPSCTLHCDCGGGADCDPVSGQCHCVDGYMGPTCREAGTLPASSRPTSRSGGPARH

SEQ ID NO: 887 - DNA, 877 bp, Homo sapiens
  CDS (25)..(534)
ccggagctgcctgtgatgccgtgaatggctcctgcctctgccccgctggccgccggggcccccgctgtgccgagacctgccctgccggcctgtacggcgacaactgtcggcattcctgcctctgccagaacggagggacctgtgaccctgtctcaggcctgcgagcacccctgtccccctggcttccacggggctggccgccaggggttgtgctggtgtcaacatggagccccctgcgaccccatcagtggccgatgcctctgccctgccggcttccacggccacttctgtgagagggattgcagaaggggccagtttgggcccagctgcaccctgcactgtgactgcgggggtggggctgactgcgaccctgtcagtgggcagtgtcactgtgtggatggctacatggggcccacgtgccgggaaggtaggcccctccggctccccgagaacccgtccttagcccagggctcagcgggcacactgcccgcctccagcagacccacatcccggagcggtggaccagcgaggcactagtagaggcagtcccgtggagcccgcctctccagtcccagccagaggggaccctggcctttggtgaccactgagaaggacacttcacgggcccagagctcctggtactgcccttcctttgagggccgtggagggctgtggacagcccagcaacctgtcgctcttggaggctggtgtggccttgaggagggaagcctcgcatggccgctggaagagaggcgtctcctggcctggctctgcagaacccaggggcacgctctgggcctgggctgaggaagtcccgctctcccgcggctctgagttggactgaggacaggtgtgggcgccagtgtgggtgcaggcg

SEQ ID NO: 888 - protein, 170 aa, Homo sapiens
MAPASAPLAAGAPAVPRPALPACTATTVGIPASARTEGPVTLSQACEHPCPPGFHGAGRQGLCWCQHGAPCDPISGRCLCPAGFHGHFCERDCRRGQFGPSCTLHCDCGGGADCDPVSGQCHCVDGYMGPTCREGRPLRLPENPSLAQGSAGTLPASSRPTSRSGGPARH

SEQ ID NO: 889 - DNA, 695 bp, Homo sapiens
  CDS (53)..(661)
gcaccctggcccagctctgagtcctgggaccctcggtcctctctcctgggccatggccaactcaggcctccagctcctgggctacttcttggccctgggtggctgggtgggcatcattgctagcacagccctgccacagtggaagcagtcttcctacgcaggcgacgccatcatcactgccgtgggcctctatgaagggctctggatgtcctgcgcctcccagagcactgggcaagtgcagtgcaagctctacgactcgctgctcgccctggacggtaggccccaggccgcgcgggccctgatggtggtggccgtgctcctgggcttcgtggccatggtcctcagcgtagttggcatgaagtgtacgcgggtgggagacagcaaccccattgccaagggccgtgttgccatcgccgggggagccctcttcatcctggcaggcctctgcactttgactgctgtctcgtggtatgccaccctggtgacccaggagttcttcaacccagaatttggcccagccctgttcgtgggctgggcctcagctggcctggccgtgctgggcggctccttcctctgctgcacatgcccggagccagagagacccaacagcagcccacagccctatcggcctggaccctctgctgctgcccgagagtacgtctgagctccgcctgccctggccagccccccaccca

SEQ ID NO: 890 - protein, 203 aa, Homo sapiens
MANSGLQLLGYFLALGGWVGIIASTALPQWKQSSYAGDAIITAVGLYEGLWMSCASQSTGQVQCKLYDSLLALDGRPQAARALMVVAVLLGFVAMVLSVVGMKCTRVGDSNPIAKGRVAIAGGALFILAGLCTLTAVSWYATLVTQEFFNPEFGPALFVGWASAGLAVLGGSFLCCTCPEPERPNSSPQPYRPGPSAAAREYV

SEQ ID NO: 891 - DNA, 655 bp, Homo sapiens
  CDS (2)..(655)
caccggatccaccatggccaactcaggcctccagctcctgggctacttcttggccctgggtggctgggtgggcatcattgctagcacagccctgccacagtggaagcagtcttcctacgcaggcgacgccatcatcactgccgtgggcctctatgaagggctctggatgtcctgcgcctcccagagcactgggcaagtgcagtgcaagctctacgactcgctgctcgccctggacggtcacatccaatcagcgcgggccctgatggtggtggccgtgctcctgggcttcgtggccatggtcctcagcgtagttggcatgaagtgtacgcgggtgggagacagcaaccccattgccaagggccgtgttgccatcgccgggggagccctcttcatcctggcaggcctctgcactttgactgctgtctcgtggtatgccaccctggtgacccaggagttcttcaacccaagcacacctgtcaatgccaggtatgaatttggcccagccctgttcgtgggctgggcctcagctggcctggccgtgctgggcggctccttcctctgctgcacatgcccggagccagagagacccaacagcagcccacagccctatcggcctggaccctctgctgctgcccgagagtacgtcgtcgacggc

SEQ ID NO: 892 - protein, 218 aa, Homo sapiens
TGSTMANSGLQLLGYFLALGGWVGIIASTALPQWKQSSYAGDAIITAVGLYEGLWMSCASQSTGQVQCKLYDSLLALDGHIQSARALMVVAVLLGFVAMVLSVVGMKCTRVGDSNPIAKGRVAIAGGALFILAGLCTLTAVSWYATLVTQEFFNPSTPVNARYEFGPALFVGWASAGLAVLGGSFLCCTCPEPERPNSSPQPYRPGPSAAAREYVVDG

SEQ ID NO: 893 - DNA, 583 bp, Homo sapiens
  CDS (2)..(583)
caccggatccagcacagccctgccacagtggaagcagtcttcctacgcaggcgacgccatcatcactgccgtgggcctctatgaagggctctggatgtcctgcgcctcccagagcactgggcaagtgcagtgcaagctctacgactcgctgctcgccctggacggtcacatccaatcagcgcgggccctgatggtggtggccgtgctcctgggcttcgtggccatggtcctcagcgtagttggcatgaagtgtacgcgggtgggagacagcaaccccattgccaagggccgtgttgccatcgccgggggagccctcttcatcctggcaggcctctgcactttgactgctgtctcgtggtatgccaccctggtgacccaggagttcttcaacccaagcacacctgtcaatgccaggtatgaatttggcccagccctgttcgtgggctgggcctcagctggcctggccgtgctgggcggctccttcctctgctgcacatgcccggagccagagagacccaacagcagcccacagccctatcggcctggaccctctgctgctgcccgagagtacgtcgtcgacggc

SEQ ID NO: 894 - protein, 194 aa, Homo sapiens
TGSSTALPQWKQSSYAGDAIITAVGLYEGLWMSCASQSTGQVQCKLYDSLLALDGHIQSARALMVVAVLLGFVAMVLSVVGMKCTRVGDSNPIAKGRVAIAGGALFILAGLCTLTAVSWYATLVTQEFFNPSTPVNARYEFGPALFVGWASAGLAVLGGSFLCCTCPEPERPNSSPQPYRPGPSAAAREYVVDG

SEQ ID NO: 895 - DNA, 556 bp, Homo sapiens
  CDS (2)..(556)
caccggatcctcaggcctccagctcctgggctacttcttggccctgggtggctgggtgggcatcattgctagcacagccctgccacagtggaagcagtcttcctacgcaggcgacgccatcatcactgccgtgggcctctatgaagggctctggatgtcctgcgcctcccagagcactgggcaagtgcagtgcaagctctacgactcgctgctcgccctggacggtcacatccaatcagcgcgggccctgatggtggtggccgtgctcctgggcttcgtggccatggtcctcagcgtagttggcatgaagtgtacgcgggtgggagacagcaaccccattgccaagggccgtgttgccatcgccgggggagccctcttcatcctggcaggcctctgcactttgactgctgtctcgtggtatgccaccctggtgacccaggagttcttcaacccaagcacacctgtcaatgccaggtatgaatttggcccagccctgttcgtgggctgggcctcagctggcctggccgtgctgggcggctccttcctcgtcgacggc

SEQ ID NO: 896 - protein, 185 aa, Homo sapiens
TGSSGLQLLGYFLALGGWVGIIASTALPQWKQSSYAGDAIITAVGLYEGLWMSCASQSTGQVQCKLYDSLLALDGHIQSARALMVVAVLLGFVAMVLSVVGMKCTRVGDSNPIAKGRVAIAGGALFILAGLCTLTAVSWYATLVTQEFFNPSTPVNARYEFGPALFVGWASAGLAVLGGSFLVDG

SEQ ID NO: 897 - DNA, 1000 bp, Homo sapiens
  CDS (2)..(979)
catggagctgagtggagccaccatggcccgggggctcgctgtcctgctagtcttgttcctgcatatcaagaacctgcctgcccaggctgcggacacatgtccagaggtgaaggtggtgggcctggagggctctgacaagctcaccattctccgaggctgcccggggctgcccggggccccagggccaaagggagaggcaggtgtcattggagagagaggagaacgcggtctccctggagcccctggaaaggcaggaccagtggggcccaagggagaccgaggagagaaggggatgcgtggagagaaaggagacgctgggcagtctcagtcgtgtgcgacaggcccacgcaactgcaaggacctgctagaccgggggtatttcctgagcggctggcacaatatctacctgcccgactgccggcccctgactgtgctctgtgacatggacacggacggagggggctggaccgttttccagcggaggatggatggctctgtggacttctatcgggactgggccgcatacaagcagggcttcggcagtcagctgggggagttctggctggggaacgacaacatccacgccctgactgcccagggaagcagcgagctccgtgtagacctggtggactttgagggcaaccaccagtttgctaagtacaaatcattcaaggtggctgacgaggcagagaagtacaagctggtactgggagcctttgtcgggggcagtgcgggtaattctctaacgggccacaacaacaacttcttctccaccaaagaccaagacaatgatgtgagttcttcgaattgtgctgagaagttccagggagcctggtggtacgccgactgtcatgcttcgagcctcaatggtctctacctcatgggaccccatgagagctatgccaatggtatcaactggagtgcggcgaaggggtacaaatatagctacaaggtgtcagagatgaaggtgcggcccgcctagacgggccaggacccctaa

SEQ ID NO: 898 - protein, 326 aa, Homo sapiens [sequence omitted]

SEQ ID NO: 899 - DNA, 651 bp, Homo sapiens
  CDS (1)..(651)
ggatccggcccacgcaactgcaaggacctgctagaccgggggtatttcctgagcggctggcacaccatctacctgcccgactgccggcccctgactgtgctctgtgacatggacacggacggagggggctggaccgttttccagcggaggatggatggctctgtggacttctatcgggactgggccgcatacaagcagggcttcggcagtcagctgggggagttctggctggggaacgacaacatccacgccctgactgcccagggaagcagcgagctccgtgtagacctggtggactttgagggcaaccaccagtttgctaagtacaaatcattcaaggtggctgacgaggcagagaagtacaagctggtactgggaacctttgtcgggggcagtgcgggtaattctctaacgggccacaacaacaacttcttctccaccaaagaccaagacaatgatgtgagttcttcgaattgtgctgagaagttccagggagcctggtggtacgccgactgtcatgcttcaaacctcaatggtctctacctcatgggaccccatgagagctatgccaatggtatcaactggagtgcggcgaaggggtacaaatatagctacaaggtgtcagagatgaaggtgcggcccgccctcgag

SEQ ID NO: 900 - protein, 217 aa, Homo sapiens
GSGPRNCKDLLDRGYFLSGWHTIYLPDCRPLTVLCDMDTDGGGWTVFQRRMDGSVDFYRDWAAYKQGFGSQLGEFWLGNDNIHALTAQGSSELRVDLVDFEGNHQFAKYKSFKVADEAEKYKLVLGTFVGGSAGNSLTGHNNNFFSTKDQDNDVSSSNCAEKFQGAWWYADCHASNLNGLYLMGPHESYANGINWSAAKGYKYSYKVSEMKVRPALE

SEQ ID NO: 901 - DNA, 651 bp, Homo sapiens
  CDS (1)..(651)
ggatccggcccacgcaactgcaaggacctgctagaccgggggtatttcctgagcggctggcacaccatctacctgcccgactgccggcccctgactgtgctctgtgacatggacacggacggagggggctggaccgttttccagcggaggatggatggctctgtggacttctatcgggactgggccgcatacaagcagggcttcggcagtcagctgggggagttctggctggggaatgacaacatccacgccctgactgcccagggaagcagcgagctccgtgtagacctggtggactttgagggcaaccaccagtttgctaagtacaaatcattcaaggtggctgacgaggcagagaagtacaagctggtactgggagcctttgtcgggggcagtgcgggtaattctctaacgggccacaacaacaacttcttctccaccaaagaccaagacaatgatgtgagttcttcgaattgtgctgagaagttccaaggagcctggtggtacgccgactgtcatgcttcaaacctcaatggtctctacctcatgggaccccatgagagctatgccaatggtatcaactggagtgcggcgaaggggtacaaatatagctacaaggtgtcagagatgaaggtgcggcccgccctcgag

SEQ ID NO: 902 - protein, 217 aa, Homo sapiens
GSGPRNCKDLLDRGYFLSGWHTIYLPDCRPLTVLCDMDTDGGGWTVFQRRMDGSVDFYRDWAAYKQGFGSQLGEFWLGNDNIHALTAQGSSELRVDLVDFEGNHQFAKYKSFKVADEAEKYKLVLGAFVGGSAGNSLTGHNNNFFSTKDQDNDVSSSNCAEKFQGAWWYADCHASNLNGLYLMGPHESYANGINWSAAKGYKYSYKVSEMKVRPALE

SEQ ID NO: 903 - DNA, 651 bp, Homo sapiens
  CDS (1)..(651)
ggatccggcccacgcaactgcaaggacctgctagaccgggggtatttcctgagcggctggcacaccatctacctgcccgactgccggcccctgactgtgctctgtgacatggacacggacggagggggctggaccggtttccagcggaggatggatggctctgtggacttctatcgggactgggccgcatacaagcagggcttcggcagtcagctgggggagttctggctggggaacgacaacatccacgccctgactgcccagggaagcagcgagctccgtgtagacctggtggactttgagggcaaccaccagtttgctaagtacaaatcattcaaggtggctgacgaggcagagaagtacaagctggtactgggagcctttgtcgggggcagtgcgggtaattctctaacgggccacaacaacaacttcttctccaccaaagaccaagacaatgatgtgagttcttcgaattgtgctgagaagttccaaggagcctggtggtacgccgactgtcatgcttcaaacctcaatggtctctacctcatgggaccccatgagagctatgccaatggtatcaactggagtgcggcgaaggggtacaaatatagctacaaggtgtcagagatgaaggtgcggcccgccctcgag

SEQ ID NO: 904 - protein, 217 aa, Homo sapiens
GSGPRNCKDLLDRGYFLSGWHTIYLPDCRPLTVLCDMDTDGGGWTGFQRRMDGSVDFYRDWAAYKQGFGSQLGEFWLGNDNIHALTAQGSSELRVDLVDFEGNHQFAKYKSFKVADEAEKYKLVLGAFVGGSAGNSLTGHNNNFFSTKDQDNDVSSSNCAEKFQGAWWYADCHASNLNGLYLMGPHESYANGINWSAAKGYKYSYKVSEMKVRPALE

SEQ ID NO: 905 - DNA, 651 bp, Homo sapiens
  CDS (1)..(651)
ggatccggcccacgcaactgcaaggacctgctagaccgggggtatttcctgagcggctggcacaccatctacctgcccgactgccggcccctgactgtgctctgtgacatggacacggacggagggggttggaccgttttccagcggaggatggatggctctgtggacttctatcgggactgggccgcatacaagcagggcttcggcagtcggctgggggagttctggctggggaacgacaacatccacgccctgactgcccagggaagcagcgagctccgtgtagacctggtggactttgagggcaaccaccagtttgctaagtacaaatcattcaaggtggctgacgaggcagagaagtacaagctggtactgggagcctttgtcgggggcagtgcgggtaattctctaacgggccacaacaacaacttcttctccaccaaagaccaagacaatgatgtgagttcttcgaattgtgctgagaagttccagggagcctggtggtacgccgactgtcatgcttcaaacctcaatggtctctacctcatgggaccccatgagagctatgccaatggtatcaactggagtgcggcgaaggggtacaaatatagctacaaggtgtcagagatgaaggtgcggcccgccctcgag

SEQ ID NO: 906 - protein, 217 aa, Homo sapiens
GSGPRNCKDLLDRGYFLSGWHTIYLPDCRPLTVLCDMDTDGGGWTVFQRRMDGSVDFYRDWAAYKQGFGSRLGEFWLGNDNIHALTAQGSSELRVDLVDFEGNHQFAKYKSFKVADEAEKYKLVLGAFVGGSAGNSLTGHNNNFFSTKDQDNDVSSSNCAEKFQGAWWYADCHASNLNGLYLMGPHESYANGINWSAAKGYKYSYKVSEMKVRPALE

SEQ ID NO: 907 - DNA, 651 bp, Homo sapiens
  CDS (1)..(651)
ggatccggcccacgcaactgcaaggacctgctagaccgggggtatttcctgagcggctggcacaccatctacctgcccgactgccggcccctgactgtgctctgtgacatggacacggacggagggggctggaccgttttccagcggaggatggatggctctgtggacttctatcgggactgggccgcatacaagcagggcttcggcagtcagctgggggagttctggctggggaatgacgacatccacgccctgactgcccagggaagcagcgagctccgtgtagacctggtggactttgagggcaaccaccagtttgctaagtacaaatcattcaaggtggctgacgaggcagagaagtacaagctggtactgggagcctttgtcgggggcagtgcgggtaattctctaacgggccacaacaacaacttcttctccaccaaagaccaagacaatgatgtgagttcttcgaattgtgctgagaagttccaaggagcctggtggtacgccgactgtcatgcttcaaacctcaatggtctctacctcatgggaccccatgagagctatgccaatggtatcaactggagtgcggcgaaggggtacaaatatagctacaaggtgtcagagatgaaggtgcggcccgccctcgag

SEQ ID NO: 908 - protein, 217 aa, Homo sapiens
GSGPRNCKDLLDRGYFLSGWHTIYLPDCRPLTVLCDMDTDGGGWTVFQRRMDGSVDFYRDWAAYKQGFGSQLGEFWLGNDDIHALTAQGSSELRVDLVDFEGNHQFAKYKSFKVADEAEKYKLVLGAFVGGSAGNSLTGHNNNFFSTKDQDNDVSSSNCAEKFQGAWWYADCHASNLNGLYLMGPHESYANGINWSAAKGYKYSYKVSEMKVRPALE

SEQ ID NO: 909 - DNA, 651 bp, Homo sapiens
  CDS (1)..(651)
ggatccggcccacgcaactgcaaggacctgctagaccgagggcacttcctgagcggctggcacaccatctacctgcccgactgccggcccctgactgtgctctgtgacatggacacggacggagggggctggaccgttttccagcggaggatggatggctctgtggacttctatcgggactgggccgcatacaagcagggcttcggcagtcagctgggggagttctggctggggaacgacaacatccacgccctgactgcccagggaagcagcgagctccgtgtagacctggtggactttgagggcaaccaccagtttgctaagtacaaatcattcaaggtggctgacgaggcagagaagtacaagctggtactgggagcctttgtcgggggcagtgcgggtaattctctaacgggccacaacaacaacttcttctccaccaaagaccaagacaatgatgtgagttcttcgaattgtgctgagaagttccaaggagcctggtggtacgccgactgtcatgcttcaaacctcaatggtctctacctcatgggaccccatgagagctatgccaatggtatcaactggagtgcggcgaaggggtacaaatatagctacaaggtgtcagagatgaaggtgcggcccgccctcgag

SEQ ID NO: 910 - protein, 217 aa, Homo sapiens
GSGPRNCKDLLDRGHFLSGWHTIYLPDCRPLTVLCDMDTDGGGWTVFQRRMDGSVDFYRDWAAYKQGFGSQLGEFWLGNDNIHALTAQGSSELRVDLVDFEGNHQFAKYKSFKVADEAEKYKLVLGAFVGGSAGNSLTGHNNNFFSTKDQDNDVSSSNCAEKFQGAWWYADCHASNLNGLYLMGPHESYANGINWSAAKGYKYSYKVSEMKVRPALE

SEQ ID NO: 911 - DNA, 1187 bp, Homo sapiens
  CDS (16)..(972)
ctgagtggagccaccatggcccgggggctcgctgtcctgctagtcttgttcctgcatatcaagaacctgcctgcccaggctgcggacacatgtccagaggtgaaggtggtgggcctggagggctctgacaagctcaccattctccgaggctgcccggggctgcccggggccccagggccaaagggagaggcaggtgtcattggagagagaggagaacgcggtctccctggagcccctggaaaggcaggaccagtggggcccaaaggagaccgaggagagaaggggatgcgtggagagaaaggagacgctgggcagtctcagtcgtgtgcgacaggcccacgcaactgcaaggacctgctagaccgggggtatttcctgagcggctggcacaccatctacctgcccgactgccggcccctgactgtgctctgtgacatggacacggacggagggggctggaccgttttccagcggaggatggatggctctgtggacttctatcgggactgggccgcatacaagcagggcttcggcagtcagctgggggagttctggctggggaacgacaacatccacgccctgactgcccagggaagcagcgagctccgtgtagacctggtggactttgagggcaaccaccagtttgctaagtacaaatcattcaaggtggctgacgaggcagagaagtacaagctggtactgggagcctttgtcgggggcagtgcgggtaattctctaacgggccacaacaacaacttcttctccaccaaagaccaagacaatgatgtgagttcttcgaattgtgctgagaagttccagggagcctggtggtacgccgactgtcatgcttcaaacctcaatggtctctacctcatgggaccccatgagagctatgccaatggtatcaactggagtgcggcgaaggggtacaaatatagctacaaggtgtcagagatgaaggtgcggcccgcctagacgggccaggacccctccacatgcacctgctagtggggaggccacacccacaagcgctgcgtcgtggaagtcaccccatttccccagccagacacactcccatgacgcccacagctgcccctttgcccccagctcagtcaagccgccacatgcccacaacctcaccagagggagaattatgtttctaaatatgtttactttgggacagaaaa

SEQ ID NO: 912 - protein, 319 aa, Homo sapiens
MARGLAVLLVLFLHIKNLPAQAADTCPEVKVVGLEGSDKLTILRGCPGLPGAPGPKGEAGVIGERGERGLPGAPGKAGPVGPKGDRGEKGMRGEKGDAGQSQSCATGPRNCKDLLDRGYFLSGWHTIYLPDCRPLTVLCDMDTDGGGWTVFQRRMDGSVDFYRDWAAYKQGFGSQLGEFWLGNDNIHALTAQGSSELRVDLVDFEGNHQFAKYKSFKVADEAEKYKLVLGAFVGGSAGNSLTGHNNNFFSTKDQDNDVSSSNCAEKFQGAWWYADCHASNLNGLYLMGPHESYANGINWSAAKGYKYSYKVSEMKVRPA

SEQ ID NO: 913 - DNA, 1332 bp, Homo sapiens
  CDS (183)..(1106)
ttttaggtctgtttgtcgtaggcagatggagcttgttataattatgcctcatagggatagtacaaggaaggggtaggctatgtgttttgtcagggagttgagaaactgtggcacaaggcgagagctggtttcctctgccctgttagagctgggggactcttcagagtcaaaggccagagagcatggagctgagtggagccaccatggcccgggggctcgctgtcctgctagtcttgttcctgcatatcaagaacctgcctgcccaggctgcggacacatgtccagaggtgaaggtggtgggcctggagggctctggcaagctcaccattctccgaggctgcccggggctgcccggggccccagggccaaagggagaggcaggtgtcattggagagagaggagaccgaggagagaaggggatgcgtggagagaaaggagacgctgggcagtctcagtcgtgtgcgacaggcccacgcaactgcaaggacctgctagaccgggggtatttcctgagcggctggcacaccatctacctgcccgactgccggcccctgactgtgctctgtgacatggacacggacggagggggctggaccgttttccagcggaggatggatggctctgtggacttctatcgggactgggccgcatacaagcagggcttcggcagtcagctgggggagttctggctggggaatgacaacatccacgccctgactgcccagggaagcagcgagctccgtgtagacctggtggactttgagggcaaccaccagtttgctaagtacaaatcattcaaggtggctgacgaggcagagaagtacaagctggtactgggagcctttgtcgggggcagtgcgggtaattctctaacgggccacaacaacaacttcttctccaccaaagaccaagacaatgatgtgagttcttcgaattgtgctgagaagttccaaggagcctggtggtacgccgactgtcatgcttcaaacctcaatggtctctacctcatgggaccccatgagagctatgccaatggtatcaactggagtgcggcgaaggggtacaaatatagctacaaggtgtcagagatgaaggtgcggcccgcctagacgggccaggacccctccacatgcacctgctagtggggaggccacacccacaagcgctgcgtcgtggaagtcaccccatttccccagccagacacactcccatgacgcccacagctgcccctttgcccccagctcagtcaagccgccacatgcccacaacctcaccagagggagaattatgtttctaaatatgtttacttttggggacagaaaaaaaaaaaaa

SEQ ID NO: 914 - protein, 308 aa, Homo sapiens
MELSGATMARGLAVLLVLFLHIKNLPAQAADTCPEVKVVGLEGSGKLTILRGCPGLPGAPGPKGEAGVIGERGDRGEKGMRGEKGDAGQSQSCATGPRNCKDLLDRGYFLSGWHTIYLPDCRPLTVLCDMDTDGGGWTVFQRRMDGSVDFYRDWAAYKQGFGSQLGEFWLGNDNIHALTAQGSSELRVDLVDFEGNHQFAKYKSFKVADEAEKYKLVLGAFVGGSAGNSLTGHNNNFFSTKDQDNDVSSSNCAEKFQGAWWYADCHASNLNGLYLMGPHESYANGINWSAAKGYKYSYKVSEMKVRPA

SEQ ID NO: 915 - DNA, 728 bp, Homo sapiens
  CDS (1)..(573)
ctgcatatcaagaacctgcctgcccaggctgcggacacatgtccagaggtgaaggtggtgggcctggagggctctgacaagctcaccattctccgaggctgcccggggctgcccggggccccagggccaaagggagaggcaggtgtcattggagagagaggagaacgcggtctccctggagcccctggaaaggcaggaccagtggggcccaaaggagaccgaggagagaaggggatgcgtggagagaaaggagacgctgggcagtctcagtcgtgtgcgacaggcccacgcaactgcaaggacctgctagaccgggggtatttcctgagcggctggcacaccatctacctgcccgactgccggcccctgactgtgctctgtgacatggacacggacggagggggctggaccgttttccagggagcctggtggtacgccgactgtcatgcttcaaacctcaatggtctctacctcatgggaccccatgagagctatgccaatggtatcaactggagtgcggcgaaggggtacaaatatagctacaaggtgtcagagatgaaggtgcggcccgcctagacgggccaggacccctccacatgcacctgctagtggggaggccacacccacaagcgctgcgtcgtggaagtcaccccatttccccagccagacacactcccatgacgcccacagctgcccctttgcccccagctcagtcaagccgccacatg

SEQ ID NO: 916 - protein, 191 aa, Homo sapiens
LHIKNLPAQAADTCPEVKVVGLEGSDKLTILRGCPGLPGAPGPKGEAGVIGERGERGLPGAPGKAGPVGPKGDRGEKGMRGEKGDAGQSQSCATGPRNCKDLLDRGYFLSGWHTIYLPDCRPLTVLCDMDTDGGGWTVFQGAWWYADCHASNLNGLYLMGPHESYANGINWSAAKGYKYSYKVSEMKVRPA

SEQ ID NO: 917 - DNA, 1104 bp, Homo sapiens
  CDS (16)..(882)
ctgagtggagccaccatggcccgggggctcgctgtcctgctagtcttgttcctgcatatcacgaacctgcctgcccaggctgcggacacatgtccagaggtgaaggtggtgggcctggagggctctgacaagctcaccattctccgaggctgcccggggctgcccggggccccaggaccaaagggagaggcaggtgtcattggagagaaaggagacgctgggcagtctcagtcgtgtgcgacaggcccacgcaactgcaaggacctgctagaccgagggtatttcctgagcggctggcacaccatctacctgcccgactgccggccccttactgtgctctgtgacatggatacggacggagggggctggaccgttttccagcggaggatggatggctctgtggacttctatcgggactgggccgcatacaagcagggcttcggcagtcagctgggggagttctggctggggaatgacaacatccacgccctgactgcccagggaagcagcgagctccgtgtagacctggtggactttgagggcaaccaccagtttgctaagtacaaatcattcaaggtggctgacgaggcagagaagtacaagctggtactgggagcctttgtcgggggcagtgcgggtaattctctaacgggccacaacaacaacttcttctccaccaaagaccaagacaatgatgtgagttcttcgaattgtgctgagaagttccagggagcctggtggtacgccgactgtcatgcttcaaacctcaatggtctctacctcatgggaccccatgagagctatgccaatggtatcaactggagtgcggcgaaggggtacaaatatagctacaaggtgtcagagatgaaggtgcggcccgcctagacgggccaggacccctccacatgcacctgctagtggggaggccacacccacaagcgctgcgtcgtggaagtcaccccatttccccagccagacacactcccatgacgcccacagctgcccctttgcccccagctcagtcaagccgccacatgcccacaacctcaccagagggagaattatgtttctaaatatgtttactttgggacagaaaaaaaaaaa

SEQ ID NO: 918 - protein, 289 aa, Homo sapiens
MARGLAVLLVLFLHITNLPAQAADTCPEVKVVGLEGSDKLTILRGCPGLPGAPGPKGEAGVIGEKGDAGQSQSCATGPRNCKDLLDRGYFLSGWHTIYLPDCRPLTVLCDMDTDGGGWTVFQRRMDGSVDFYRDWAAYKQGFGSQLGEFWLGNDNIHALTAQGSSELRVDLVDFEGNHQFAKYKSFKVADEAEKYKLVLGAFVGGSAGNSLTGHNNNFFSTKDQDNDVSSSNCAEKFQGAWWYADCHASNLNGLYLMGPHESYANGINWSAAKGYKYSYKVSEMKVRPA

SEQ ID NO: 919 - DNA, 900 bp, Homo sapiens
  CDS (7)..(894)
ggatccgcggacacatgtccagaggtgaaggtggtgggcctggagggctctgacaagctcaccattctccgaggctgcccggggctgcccggggccccagggccaaagggagaggcaggtgtcattggagagagaggagaacgcggtctccctggagcccctggaaaggcaggaccagtggggcccaaaggagaccgaggagagaaggggatgcgtggagagaaaggagacgctgggcagtctcagtcgtgtgcgacaggcccacgcaactgcaaggacctgctagaccgggggtatttcctgagcggctggcacaccatctacctgcccgactgccggcccctgactgtgctctgtgacatggacacggacggagggggctggaccgttttccagcggaggatggatggctctgtggacttctatcgggactgggccgcatacaagcagggcttcggcagtcagctgggggagttctggctggggaacgacaacatccacgccctgactgcccagggaagcagcgagctccgtgtagacctggtggactttgagggcaaccaccagtttgctaagtacaaatcattcaaggtggctgacgaggcagagaagtacaagctggtactgggagcctttgtcgggggcagtgcgggtaattctctaacgggccacaacaacaacttcttctccaccaaagaccaagacaatgatgtgagttcttcgaattgtgctgagaagttccagggagcctggtggtacgccgactgtcatgcttcaaacctcaatggtctctacctcatgggaccccatgagagctatgccaatggtatcaactggagtgcggcgaaggggtacaaatatagctacaaggtgtcagagatgaaggggcccgccctcgag

SEQ ID NO: 920 - protein, 296 aa, Homo sapiens
ADTCPEVKVVGLEGSDKLTILRGCPGLPGAPGPKGEAGVIGERGERGLPGAPGKAGPVGPKGDRGEKGMRGEKGDAGQSQSCATGPRNCKDLLDRGYFLSGWHTIYLPDCRPLTVLCDMDTDGGGWTVFQRRMDGSVDFYRDWAAYKQGFGSQLGEFWLGNDNIHALTAQGSSELRVDLVDFEGNHQFAKYKSFKVADEAEKYKLVLGAFVGGSAGNSLTGHNNNFFSTKDQDNDVSSSNCAEKFQGAWWYADCHASNLNGLYLMGPHESYANGINWSAAKGYKYSYKVSEMKGPA

SEQ ID NO: 921 - DNA, 988 bp, Homo sapiens
  CDS (56)..(904)
gtttcctctgccctgttagagctgggggactcttcagagtcaaaggccagagagcatggagctgagtggagccaccatggcccgggggctcgctgtcctgctagtcttgttcctgcatatcaagaacctgcctgcccaggctgcggacacatgtccagaggtgaaggtggtgggcctggagggctctgacaagctcaccattctccgaggctgcccggggctgcccggggccccagggccaaagggagaggcaggtgtcattggagagagaggagaacgcggtctccctggagcccctggaaaggcaggaccagtggggcccaaaggagaccgaggagagaaggggatgcgtggagagaaaggagacgctgggcagtctcagtcgtgtgcgacaggtccacgcaactgcaaggacctgctagaccgggggtatttcctgagcggctggcacaccatctacctgcccgactgccggcccctgactgtgctctgtgacatggacacggacggagggggctggaccgttttccagcggaggatggatggctctgtggactttgagggcaaccaccagtttgctaagtacaaatcattcaaggtggctgacgaggcagagaagtacaagctggtactgggagcctttgtcgggggcagtgcgggtaattctctaacgggccacaacaacaacttcttctccaccaaagaccaagacaatgatgtgagttcttcgaattgtgctgagaagttccaaggagcctggtggtacgccgactgtcatgcttcaaacctcaatggtctctacctcatgggaccccatgagagctatgccaatggtatcaactgcagtgcggcgaaggggtacaaatatagctacaaggtgtcagagatgaaggtgcggcccgcctagacgggccaggacccctccacatgcacctgctagtggggaggccacacccacaagcgctgcgtcgtggaagtcacccatttc

SEQ ID NO: 922 - protein, 283 aa, Homo sapiens
MELSGATMARGLAVLLVLFLHIKNLPAQAADTCPEVKVVGLEGSDKLTILRGCPGLPGAPGPKGEAGVIGERGERGLPGAPGKAGPVGPKGDRGEKGMRGEKGDAGQSQSCATGPRNCKDLLDRGYFLSGWHTIYLPDCRPLTVLCDMDTDGGGWTVFQRRMDGSVDFEGNHQFAKYKSFKVADEAEKYKLVLGAFVGGSAGNSLTGHNNNFFSTKDQDNDVSSSNCAEKFQGAWWYADCHASNLNGLYLMGPHESYANGINCSAAKGYKYSYKVSEMKVRPA

SEQ ID NO: 923 - DNA, 970 bp, Homo sapiens
  CDS (2)..(949)
ggggctcgctgtcatgctagtcttgttcctgcatatcaagaacctgcctgcccaggctgcggacacatgtccagaggtgaaggtggtgggcctggagggctctgacaagctcaccattctccgaggctgcccggggctgcccggggccccagggccaaagggagaggcaggtgtcattggagagagaggagaacgcggtctccctggagcccctggaaaggcaggaccagtggggcccaaaggagaccgaggagagaaggggatgcgtggagagaaaggagacgctgggcagtctcagtcgtgtgcgacaggcccacgcaactgcaaggacctgctagaccgggggtatttcctgagcggctggcacaccatctacctgcccgactgccggcccctgactgtgctctgtgacatggacacggacggagggggctggaccgttttccagcggaggatggatggctctgtggacttctatcgggactgggccgcatacaagcagggcttcggcagtcagctgggggagttctggctggggaatgacaacatccacgccttgactgcccagggaagcagcgagctccgtgtagacctggtggactttgagggcaaccaccagtttgctaagtacaaatcattcaaggtggctgacgaggcagagaagtacaagctggtactgggagcctttgtcgggggcagtgcgggtaattctctaacgggccacaacaacaacttcttctccaccaaagaccaagacaatgatgtgagttcttcgaattgtgctgagaagttccaaggagcctggtggtacgccgactgtcatgcttcaaacctcaatggtctctacctcatgggaccccatgagagctatgccaatggtatcaactggagtgcggcgaaggggtacaaatatagctacaaggtgtcagagatgaaggtgcggcccgcctagacgggccaggacccctcc

SEQ ID NO: 924 - protein, 316 aa, Homo sapiens
GLAVMLVLFLHIKNLPAQAADTCPEVKVVGLEGSDKLTILRGCPGLPGAPGPKGEAGVIGERGERGLPGAPGKAGPVGPKGDRGEKGMRGEKGDAGQSQSCATGPRNCKDLLDRGYFLSGWHTIYLPDCRPLTVLCDMDTDGGGWTVFQRRMDGSVDFYRDWAAYKQGFGSQLGEFWLGNDNIHALTAQGSSELRVDLVDFEGNHQFAKYKSFKVADEAEKYKLVLGAFVGGSAGNSLTGHNNNFFSTKDQDNDVSSSNCAEKFQGAWWYADCHASNLNGLYLMGPHESYANGINWSAAKGYKYSYKVSEMKVRPA

SEQ ID NO: 925 - DNA, 1144 bp, Homo sapiens
  CDS (183)..(980)
ttttaggtctgtttgtcgtaggcagatggagcttgttataattatgcctcatagggatagtacaaggaaggggtaggctatgtgttttgtcagggagttgagaaactgtggcacaaggcgagagctggtttcctctgccctgttagagctgggggactcttcagagtcaaaggccagagagcatggagctgagtggagccaccatggcccgggggctcgctgtcctgctagtcttgttcctgcatatcaagaacctgcctgcccaggctgcggacacatgtccagaggtgaaggtggtgggcctggagggctctgacaagctcaccattctccgaggctgcccggggctgcccggggccccagggccaaagggagaggcaggtgtcattggagagagaggagaacgcggtctccctggagcccctggaaaggcaggaccagtggggcccaaaggagaccgaggagagaaggggatgcgtggagagaaaggagacgctgggcagtctcagtcgtgtgcgacaggcccacgcaactgcaaggacctgctagaccgggggtatttcctgagcggctggcacaccatctacctgcccgactgccggcccctgactgtgctctgtgacatggacacggacggagggggctggaccgttttccagcggaggatggatggctctgtggacttctatcgggactgggccgcatacaagcagggcttcggcagtcagctggggggtaattctctaacgggccacaacaacaacttcttctccaccaaagaccaagacaatgatgtgagttcttcgaattgtgctgagaagttccaaggagcctggtggtacgccgactgtcatgcttcaaacctcaatggtctctacctcatgggaccccatgagagctatgccaatggtatcaactggagtgcggcgaaggggtacaaatatagctacaaggtgtcagagatgaaggtgcggcccgcctagacgggccaggacccctccacatgcacctgctagtggggaggccacacccacaagcgctgcgtcgtggaagtcaccccatttccccagccagacacactcccatgacgcccacagctgcccctttgcccccagctcagtcaagccgccacatgcccacaacc

SEQ ID NO: 926 - protein, 266 aa, Homo sapiens
MELSGATMARGLAVLLVLFLHIKNLPAQAADTCPEVKVVGLEGSDKLTILRGCPGLPGAPGPKGEAGVIGERGERGLPGAPGKAGPVGPKGDRGEKGMRGEKGDAGQSQSCATGPRNCKDLLDRGYFLSGWHTIYLPDCRPLTVLCDMDTDGGGWTVFQRRMDGSVDFYRDWAAYKQGFGSQLGGNSLTGHNNNFFSTKDQDNDVSSSNCAEKFQGAWWYADCHASNLNGLYLMGPHESYANGINWSAAKGYKYSYKVSEMKVRPA

SEQ ID NO: 927 - DNA, 651 bp, Homo sapiens; identical to SEQ ID NO: 909
  CDS (7)..(645)

SEQ ID NO: 928 - protein, 213 aa, Homo sapiens
GPRNCKDLLDRGHFLSGWHTIYLPDCRPLTVLCDMDTDGGGWTVFQRRMDGSVDFYRDWAAYKQGFGSQLGEFWLGNDNIHALTAQGSSELRVDLVDFEGNHQFAKYKSFKVADEAEKYKLVLGAFVGGSAGNSLTGHNNNFFSTKDQDNDVSSSNCAEKFQGAWWYADCHASNLNGLYLMGPHESYANGINWSAAKGYKYSYKVSEMKVRPA

SEQ ID NO: 929 - DNA, 1045 bp, Homo sapiens
  CDS (38)..(1015)
gagctgggggactcttcagagtcaaaggccagagagcatggagctgagtggagccaccatggcccgggggctcgctgtcctgctagtcttgttcctgcatatcaagaacctgcctgcccaggctgcggacacatgtccagaggtgaaggtggtgggcctggagggctctgacaagctcaccattctccgaggctgcccggggctgcccggggccccagggccaaagggagaggcaggtgtcattggagagagaggagaacgcggtctccctggagcccctggaaaggcaggaccagtggggcccaaaggagaccgaggagagaaggggatgcgtggagagaaaggagacgctgggcagtctcagtcgtgtgcgacaggcccacgcaactgcaaggacctgctagaccgggggtatttcctgagcggctggcacaccatctacctgcccgactgccggcccctgactgtgctctgtgacatggacacggacggagggggctggaccgttttccagcggaggatggatggctctgtggacttctatcgggactgggccgcatacaagcagggcttcggcagtcagctgggggagttctggctggggaacgacaacatccacgccctgactgcccagggaagcagcgagctccgtgtagacctggtggactttgagggcaaccaccagtttgctaagtacaaatcattcaaggtggctgacgaggcagagaagtacaagctggtactgggagcctttgtcgggggcagtgcgggtaattctctaacgggccacaacaacaacttcttctccaccaaagaccaagacaatgatgtgagttcttcgaattgtgctgagaagttccagggagcctggtggtacgccgactgtcatgcttcaaacctcaatggtctctacctcatgggaccccatgagagctatgccaatggtatcaactggagtgcggcgaaggggtacaaatatagctacaaggtgtcagagatgaaggtgcggcccgcctagacgggccaggacccctccacatgcacc

SEQ ID NO: 930 - protein, 326 aa, Homo sapiens
MELSGATMARGLAVLLVLFLHIKNLPAQAADTCPEVKVVGLEGSDKLTILRGCPGLPGAPGPKGEAGVIGERGERGLPGAPGKAGPVGPKGDRGEKGMRGEKGDAGQSQSCATGPRNCKDLLDRGYFLSGWHTIYLPDCRPLTVLCDMDTDGGGWTVFQRRMDGSVDFYRDWAAYKQGFGSQLGEFWLGNDNIHALTAQGSSELRVDLVDFEGNHQFAKYKSFKVADEAEKYKLVLGAFVGGSAGNSLTGHNNNFFSTKDQDNDVSSSNCAEKFQGAWWYADCHASNLNGLYLMGPHESYANGINWSAAKGYKYSYKVSEMKVRPA

SEQ ID NO: 931 - DNA, 972 bp, Homo sapiens
  CDS (10)..(966)
ggatccaccatggcccgggggctcgctgtcctgctagtcttgttcctgcatatcaagaacctgcctgcccaggctgcggacacatgtccagaggtgaaggtggtgggcctggagggctctgacaagctcaccattctccgaggctgcccggggctgcccggggccccagggccaaagggagaggcaggtgtcattggagagagaggagaacgcggtctccctggagcccctggaaaggcaggaccagtggggcccaaaggagaccgaggagagaaggggatgcgtggagagaaaggagacgctgggcagtctcagtcgtgtgcgacaggcccacgcaactgcaaggacctgctagaccgggggtatttcctgagcggctggcacaccatctacctgcccgactgccggcccctgactgtgctctgtgacatggacacggacggagggggctggaccgttttccagcggaggatggatggctctgtggacttctatcgggactgggccgcatacaagcagggcttcggcagtcagctgggggagttctggctggggaacgacaacatccacgccctgactgcccagggaagcagcgagctccgtgtagacctggtggactttgagggcaaccaccagtttgctaagtacaaatcattcaaggtggctgacgaggcagagaagtacaagctggtactgggagcctttgtcgggggcagtgcgggtaattctctaacgggccacaacaacaacttcttctccaccaaagaccaagacaatgatgtgagttcttcgaattgtgctgagaagttccagggagcctggtggtacgccgactgtcatgcttcaaacctcaatggtctctacctcatgggaccccatgagagctatgccaatggtatcaactggagtgcggcgaaggggtacaaatatagctacaaggtgtcagagatgaaggtgcggcccgccctcgag

SEQ ID NO: 932 - protein, 319 aa, Homo sapiens; identical to SEQ ID NO: 912

SEQ ID NO: 933 - DNA, 1500 bp, Homo sapiens
  CDS (74)..(1489)
cttccgagcgggcgcccgtccgccctgccgccgccgccgccgccgcttcgcctgccggcctgagagcgggaccatggatgaaaggttcaacaagtggctgctgacgccggtgctcactctcctcttcgtggtcatcatgtaccagtacgtgtccccctcctgcaccagctcctgcaccaacttcggggagcagccccgcgcgggggaggccggcccgcccgccgtcccgggtcccgcccgccgggctcaggcgccgccggaggagtgggagcagaggaggccccagttgcccccgccgccccgggggccccccgagggacctcggggggccgcggcgccggaggaggaggacgaggagcccggagacccccgggagggggaggaagaggaggaggaagacgagccggaccccgaggccccggaaaacggctccctgccccgattcgtgccgcgcttcaacttcagcctgaaggacctgacccgcttcgtggatttcaacatcaaagggcgcgacgtgatcgtgttcctccacatccagaagacggggggcaccactttcggccggcacctggtgaagaacatccggctggagcagccttgtagctgcaaagcgggtcagaagaagtgcacctgccaccggcctggcaagaaggagacgtggctcttctcccgcttctccaccggctggagctgcgggctgcacgccgactggacggagctcaccaactgcgtgccggccatcatggagaagaaggactgtccccgcaaccacagccacaccaggaatttctattacatcacaatgttacgggatccagtgtcacgttacctgagcgagtggaaacatgtccagagaggggccacttggaaaacctctcttcatatgtgtgatggaagaagccccaccccagatgagctgcctacctgctaccctggggatgactggtctggggtcagcttgcgggagtttatggattgcacctacaacctggctaacaatcgccaggtgcgcatgctggctgacctcagcctggtgggctgctataacttgactttcatgaacgagagtgaaagaaacaccatcctgttgcagagtgcaaagaacaacctgaagaacatggccttctttgggctcactgagttccagaggaagacacagtttctctttgagagaacattcaacctcaagttcatctcccccttcacacagttcaacatcacgcgggcttctaacgtggagatcaacgagggtgcccgccaacgcattgaggatctaaacttcctggacatgcagctttacgagtatgcaaaagatctcttccagcagcgctaccaccacaccaagcagctagagcaccagagggaccgccagaagcggcgggaggagcggaggctgcagcgagagcacagggaccaccagtggcccaaagaagatggggctgcagaagggactgtcaccgaggactacaacagccaggtggtgagatggtgacctcctgc

SEQ ID NO: 934 - protein, 472 aa, Homo sapiens
MDERFNKWLLTPVLTLLFVVIMYQYVSPSCTSSCTNFGEQPRAGEAGPPAVPGPARRAQAPPEEWEQRRPQLPPPPRGPPEGPRGAAAPEEEDEEPGDPREGEEEEEEDEPDPEAPENGSLPRFVPRFNFSLKDLTRFVDFNIKGRDVIVFLHIQKTGGTTFGRHLVKNIRLEQPCSCKAGQKKCTCHRPGKKETWLFSRFSTGWSCGLHADWTELTNCVPAIMEKKDCPRNHSHTRNFYYITMLRDPVSRYLSEWKHVQRGATWKTSLHMCDGRSPTPDELPTCYPGDDWSGVSLREFMDCTYNLANNRQVRMLADLSLVGCYNLTFMNESERNTILLQSAKNNLKNMAFFGLTEFQRKTQFLFERTFNLKFISPFTQFNITRASNVEINEGARQRIEDLNFLDMQLYEYAKDLFQQRYHHTKQLEHQRDRQKRREERRLQREHRDHQWPKEDGAAEGTVTEDYNSQVVRW

SEQ ID NO: 935 - DNA, 750 bp, Homo sapiens
  CDS (1)..(750)
cgcggtacctgtccccgcaaccacagccacaccaggaatttctattacatcacaatgttacgggatccagtgtcacgttacctgagcgagtggaaacatgtccagagaggggccacttggaaaacctctcttcatatgtgtgatggaagaagccccaccccagatgggctgcctacctgctaccctggggatgactggtctggggtcagcttgcgggagtttatggattgcacctacaacctggctaacaatcgccaggtgcgcatgctggctgacctcagcctggtgggctgctataacttgactttcatgaacgagagtgaaagaaacaccatcctgttgcagagtgcaaagaacaacctgaagaacatggccttctttgggctcactgagttccagaggaagacacagtttctctttgagagaacattcaacctcaagttcatctcccccttcacacagttcaacatcacgcgggcttctaacgtggagatcaacgagggtgcccgccaacgcattgaggatctaaacttcctggacatgcagctttacgagtatgcaaaagatctcttccagcagcgctaccaccacaccaagcagctagagcaccagagggaccgccagaagcggcgggaggagcggaggctgcagcgagagcacagggaccaccagtggcccaaagaagatggggctgcagaagggactgtcaccgaggactacaacagccaggtggtgagatggctcgaggcg

SEQ ID NO: 936 - protein, 250 aa, Homo sapiens
RGTCPRNHSHTRNFYYITMLRDPVSRYLSEWKHVQRGATWKTSLHMCDGRSPTPDGLPTCYPGDDWSGVSLREFMDCTYNLANNRQVRMLADLSLVGCYNLTFMNESERNTILLQSAKNNLKNMAFFGLTEFQRKTQFLFERTFNLKFISPFTQFNITRASNVEINEGARQRIEDLNFLDMQLYEYAKDLFQQRYHHTKQLEHQRDRQKRREERRLQREHRDHQWPKEDGAAEGTVTEDYNSQVVRWLEA

SEQ ID NO: 937 - DNA, 750 bp, Homo sapiens
  CDS (1)..(750)
cgcggtacctgtccccgcaaccacagccacaccaggaatttctattacatcacaatgttacgggatccagtgtcacgttacctgagtgagtggaaacatgtccagagaggggccacttggaaaacctctcttcatatgtgtgatggaagaagccccaccccagatgagctgcctacctgctaccctggggatgactggtctggggtcagcttgcgggagtttatggattgcacctacaacctggctaacaatcgccaggtgcgcatgctggctgacctcagcctggtgggctgctataacttgactttcatgaacgagagtgaaagaaacaccatcctgttgcagagtgcaaagaacaacctgaagaacatggccttctttgggctcactgagttccagaggaagacacagtttctctttgagagaacattcaacctcaagttcatctcccccttcacacagttcaacatcacgcgggcttctaacgtggagatcaacgagggtgcccgccaacgcattgaggatctaaacttcctggacatgcagctttacgagtatgcaaaagatctcttccagcagcgctaccaccacaccaagcagctagagcgccagagggaccgccagaagcggcgggaggagcggaggctgcagcgagagcacagggaccaccagtggcccaaagaagatggggctgcagaagggactgtcaccgaggactacaacagccaggtggtgagatggctcgaggcg

SEQ ID NO: 938 - protein, 250 aa, Homo sapiens
RGTCPRNHSHTRNFYYITMLRDPVSRYLSEWKHVQRGATWKTSLHMCDGRSPTPDELPTCYPGDDWSGVSLREFMDCTYNLANNRQVRMLADLSLVGCYNLTFMNESERNTILLQSAKNNLKNMAFFGLTEFQRKTQFLFERTFNLKFISPFTQFNITRASNVEINEGARQRIEDLNFLDMQLYEYAKDLFQQRYHHTKQLERQRDRQKRREERRLQREHRDHQWPKEDGAAEGTVTEDYNSQVVRWLEA

SEQ ID NO: 939 - DNA, 750 bp, Homo sapiens
  CDS (1)..(750)
cgcggtacctgtccccgcaaccacagccacaccaggaatttctattacatcacaatgttacgggatccagtgtcacgttacctgagtgagtggaaacatgcccagagaggggccacttggaaaacctctcttcatatgtgtgatggaagaagccccaccccagatgagctgcctacctgctaccctggggatgactggtctggggtcagcttgcgggagtttatggattgcacctacaacctggctaacaatcgccaggtgcgcatgctggctgacctcagcctggtgggctgctataacttgactttcatgaacgagagtgaaagaaacaccatcctgttgcagagtgcaaagaacaacctgaagaacatggccttctttgggctcactgagttccagaggaagacacagtttctctttgagagaacattcaacctcaagttcatctcccccttcacacagttcaacatcacgcgggcttctaacgtggagatcaacgagggtgcccgccaacgcattgaggatctaaacttcctggacatgcagctttacgagtatgcaaaagatctcttccagcagcgctaccaccacaccaagcagctagagcaccagagggaccgccagaagcggcgggaggagcggaggctgcagcgagagcacagggaccaccagtggcccaaagaagatggggctgcagaagggactgtcaccgaggactacaacagccaggtggtgagatggctcgaggcg

SEQ ID NO: 940 - protein, 250 aa, Homo sapiens
RGTCPRNHSHTRNFYYITMLRDPVSRYLSEWKHAQRGATWKTSLHMCDGRSPTPDELPTCYPGDDWSGVSLREFMDCTYNLANNRQVRMLADLSLVGCYNLTFMNESERNTILLQSAKNNLKNMAFFGLTEFQRKTQFLFERTFNLKFISPFTQFNITRASNVEINEGARQRIEDLNFLDMQLYEYAKDLFQQRYHHTKQLEHQRDRQKRREERRLQREHRDHQWPKEDGAAEGTVTEDYNSQVVRWLEA

SEQ ID NO: 941 - DNA, 750 bp, Homo sapiens
  CDS (1)..(750)
cgcggtacctgtccccgcaaccacagccacaccaggaatttctattacatcacaatgttacgggatccagtgtcacgttacctgagtgagtggaaacatgtccagagaggggccacttggaaaacctctcttcatatgtgtgatggaagaagccccaccccagatgagctgcctacctgctaccctggggatgactggtctggggtcagcttgcgggagtttatggattgcacctacaacctggctaacaatcgccaggtgcgcatgctggctgacctcagcctggtgggctgctataacttgactttcatgaacgagagtgaaagaaacaccatcctgttgcagagtgcaaagaacaacctgaagaacatggccttctttgggctcactgagttccagaggaagacacagtttctctttgagagagcattcaacctcaagttcatctcccccttcacacagttcaacatcacgcgggcttctaacgtggagatcaacgagggtgcccaccaacgcattgaggatctaaacttcctggacatgcagctttacgagtatgcaaaagatctcttccagcagcgctaccaccacgccaagcagctagagcaccagagggaccgccagaagcggcgggaggagcggaggctgcagcgagagcacagggaccaccagtggcccaaagaagatggggctgcagaagggactgtcaccgaggactacaacagccaggtggtgagatggctcgaggcg

SEQ ID NO: 942 - protein, 250 aa, Homo sapiens
RGTCPRNHSHTRNFYYITMLRDPVSRYLSEWKHVQRGATWKTSLHMCDGRSPTPDELPTCYPGDDWSGVSLREFMDCTYNLANNRQVRMLADLSLVGCYNLTFMNESERNTILLQSAKNNLKNMAFFGLTEFQRKTQFLFERAFNLKFISPFTQFNITRASNVEINEGAHQRIEDLNFLDMQLYEYAKDLFQQRYHHAKQLEHQRDRQKRREERRLQREHRDHQWPKEDGAAEGTVTEDYNSQVVRWLEA

SEQ ID NO: 943 - DNA, 750 bp, Homo sapiens
  CDS (1)..(750)
cgcggtacctgtccccgcaaccacagccacaccaggaatttctattacatcacaatgttacgggatccagtgtcacgttacctgagcgagtggaaacatgtccagagaggggccacttggaaaacctctcttcatatgtgtgatggaagaagccccaccccagatgagctgcctacctgctaccctggggatgactggtctggggtcagcttgcgggagtttatggattgcacctacaacctggctaacaatcgccaggtgcgcatgctggctgacctcagcctggtgggctgctataacttgactttcatgaacgagagtgaaagaaacaccatcctgttgcagagtgcaaagaacaacctgaagaacatggccttctttgggctcactgagttccagaggaagacacagtttctctttgagagaacattcaacctcaagttcatctcccccttcacacagttcaacatcacgcgggcttctaacgtggagatcaacgagggtgcccgccaacgcattgaggatctaaacttcctggacatgcagctttacgagtatgcaaaagatctcttccagcagcgctaccaccacaccaagcagctagagcaccagagggaccgccagaagcggcgggaggagcggaggctgcagcgagagcacagggaccaccagtggcccaaagaagatggggctgcagaagggactgtcaccgaggactacaacagccaggtggtgagatggctcgaggcg

SEQ ID NO: 944 - protein, 250 aa, Homo sapiens
RGTCPRNHSHTRNFYYITMLRDPVSRYLSEWKHVQRGATWKTSLHMCDGRSPTPDELPTCYPGDDWSGVSLREFMDCTYNLANNRQVRMLADLSLVGCYNLTFMNESERNTILLQSAKNNLKNMAFFGLTEFQRKTQFLFERTFNLKFISPFTQFNITRASNVEINEGARQRIEDLNFLDMQLYEYAKDLFQQRYHHTKQLEHQRDRQKRREERRLQREHRDHQWPKEDGAAEGTVTEDYNSQVVRWLEA

SEQ ID NO: 945 - DNA, 1500 bp, Homo sapiens
  CDS (74)..(1489)
cttccgagcgggcgcccgtccgccctgccgccgccgccgccgccgcttcgcctgccggcctgagagcgggaccatggatgaaaggttcaacaagtggctgctgacgccggtgctcactctcctcttcgtggtcatcatgtaccagtacgtgtccccctcctgcaccagctcctgcaccaacttcggggagcagccccgcgcgggggaggccggcccgcccgccgtcccgggtcccgcccgccgggctcaggcgccgccggaggagtgggagcagaggaggccccagttgcccccgccgccccgggggccccccgagggacctcggggggccgcggcgccggaggaggaggacgaggagcccggagacccccgggagggggaggaagaggaggaggaagacgagccggaccccgaggccccggaaaacggctccctgccccgattcgtgccgcgcttcaacttcagcctgaaggacctgacccgcttcgtggatttcaacatcaaagggcgcgacgtgatcgtgttcctccacatccagaagacggggggcaccactttcggccggcacctggtgaagaacatccggctggagcagccttgtagctgcaaagcgggtcagaagaagtgcacctgccaccggcctggcaagaaggagacgtggctcttctcccgcttctccaccggctggagctgcgggctgcacgccgactggacggagctcaccaactgcgtgccggccatcatggagaagaaggactgtccccgcaaccacagccacaccaggaatttctattacatcacaatgttacgggatccagtgtcacgttacctgagcgagtggaaacatgtccagagaggggccacttggagaacctctcttcatatgtgtgatggaagaagccccaccccagatgagctgcctacctgctaccctggggatgactggtctggggtcagcttgcgggagtttatggattgcacctacaacctggctaacaatcgccaggtgcgcatgctggctgacctcagcctggtgggctgctataacttgactttcatgaacgagagtgaaagaaacaccatcctgttgcagagtgcaaagaacaacctgaagaacatggccttctttgggctcactgagttccagaggaagacacagtttctctttgagagaacattcaacctcaagttcatctcccccttcacacagttcaacatcacgcgggcttctaacgtggagatcaacgagggtgcccgccaacgcattgaggatctaaacttcctggacatgcagctttacgagtatgcaaaagatctcttccagcagcgctaccaccacaccaagcagctagagcaccagagggaccgccagaagcggcgggaggagcggaggctgcagcgagagcacagggaccaccagtggcccaaagaagatggggctgcagaagggactgtcaccgaggactacaacagccaggtggtgagatggtgacctcctgc

SEQ ID NO: 946 - protein, 472 aa, Homo sapiens
MDERFNKWLLTPVLTLLFVVIMYQYVSPSCTSSCTNFGEQPRAGEAGPPAVPGPARRAQAPPEEWEQRRPQLPPPPRGPPEGPRGAAAPEEEDEEPGDPREGEEEEEEDEPDPEAPENGSLPRFVPRFNFSLKDLTRFVDFNIKGRDVIVFLHIQKTGGTTFGRHLVKNIRLEQPCSCKAGQKKCTCHRPGKKETWLFSRFSTGWSCGLHADWTELTNCVPAIMEKKDCPRNHSHTRNFYYITMLRDPVSRYLSEWKHVQRGATWRTSLHMCDGRSPTPDELPTCYPGDDWSGVSLREFMDCTYNLANNRQVRMLADLSLVGCYNLTFMNESERNTILLQSAKNNLKNMAFFGLTEFQRKTQFLFERTFNLKFISPFTQFNITRASNVEINEGARQRIEDLNFLDMQLYEYAKDLFQQRYHHTKQLEHQRDRQKRREERRLQREHRDHQWPKEDGAAEGTVTEDYNSQVVRW

SEQ ID NO: 947 - DNA, 1500 bp, Homo sapiens
  CDS (74)..(1489)
cttccgagcgggcgcccgtccgccctgccgccgccgccgccgccgcttcgcctgccggcctgagagcgggaccatggatgaaaggttcaacaagtggctgctgacgccggtgctcactctcctcttcgtggtcatcatgtaccagtacgtgtccccctcctgcaccagctcctgcaccaacttcggggagcagccccgcgcgggggaggccggcccgcccgccgtcccgggtcccgcccgccgggctcaggcgccgccggaggagtgggagcagaggaggccccagttgcccccgccgccccgggggccccccgagggacctcggggggccgcggcgccggaggaggaggacgaggagcccggagacccccgggagggggaggaagaggaggaggaagacgagccggaccccgaggccccggaaaacggctccctgccccgattcgtgccgcgcttcaacttcagcctgaaggacctgacccgcttcgtggatttcaacatcaaagggcgcgacgtgatcgtgttcctccacatccagaagacggggggcaccactttcggccggcacctggtgaagaacatccggctggagcagccttgtagctgcaaagcgggtcagaagaagtgcacctgccaccggcctggcaagaaggagacgtggctcttctcccgcttctccaccggctggagctgcgggctgcacgccgactggacggagctcaccaactgcgtgccggccatcatggagaagaaggactgtccccgcaaccacagccacaccaggaatttctattacatcacaatgttacgggatccagtgtcacgttacctgagcgagtggaaacatgtccagagaggggccacttggaaaacctctcttcatatgtgtgatggaagaagccccaccccagatgagctgcctacctgctaccctggggatgactggtctggggtcagcttgcgggagtttatggattgcacctacaacctggctaacaatcgccaggtgcgcatgctggctgacctcagcctggtgggctgctataacttgactttcatgaacgagagtgaaagaaacaccatcctgttgcagagtgcaaagaacaacctgaagaacatggccttctttgggctcactgagttccagaggaagacacagtttctctttgagagaacattcaacctcaagctcatctcccccttcacacagttcaacatcacgcgggcttctaacgtggagatcaacgagggtgcccgccaacgcattgaggatctaaacttcctggacatgcagctttacgagtatgcaaaagatctcttccagcagcgctaccaccacaccaagcagctagagcaccagagggaccgccagaagcggcgggaggagcggaggctgcagcgagagcacagggaccaccagtggcccaaagaagatggggctgcagaagggactgtcaccgaggactacaacagccaggtggtgagatggtgacctcctgc

SEQ ID NO: 948 - protein, 472 aa, Homo sapiens
MDERFNKWLLTPVLTLLFVVIMYQYVSPSCTSSCTNFGEQPRAGEAGPPAVPGPARRAQAPPEEWEQRRPQLPPPPRGPPEGPRGAAAPEEEDEEPGDPREGEEEEEEDEPDPEAPENGSLPRFVPRFNFSLKDLTRFVDFNIKGRDVIVFLHIQKTGGTTFGRHLVKNIRLEQPCSCKAGQKKCTCHRPGKKETWLFSRFSTGWSCGLHADWTELTNCVPAIMEKKDCPRNHSHTRNFYYITMLRDPVSRYLSEWKHVQRGATWKTSLHMCDGRSPTPDELPTCYPGDDWSGVSLREFMDCTYNLANNRQVRMLADLSLVGCYNLTFMNESERNTILLQSAKNNLKNMAFFGLTEFQRKTQFLFERTFNLKLISPFTQFNITRASNVEINEGARQRIEDLNFLDMQLYEYAKDLFQQRYHHTKQLEHQRDRQKRREERRLQREHRDHQWPKEDGAAEGTVTEDYNSQVVRW

SEQ ID NO: 949 - DNA, 2739 bp, Homo sapiens
  CDS (86)..(2089)
ttgcactctcccacacccttttcttttcgtccgctcttcgcttatttctcccgccgtctcctctgcataagaaggggaacgaaagatggcggcggaaacgctgctgtccagtttgttaggactgctgcttctgggactcctgttacccgcaagtctgaccggcggtgtcgggagcctgaacctggaggagctgagtgagatgcgttatgggatcgagatcctgccgttgcctgtcatgggagggcagagccaatcttcggacgtggtgattgtctcctctaagtacaaacagcgctatgagtgtcgcctgccagctggagctattcacttccagcgtgaaagggaggaggaaacacctgcttaccaagggcctgggatccctgagttgttgagcccaatgagagatgctccctgcttgctgaagacaaaggactggtggacatatgaattctgttatggacgccacatccagcaataccacatggaagattcagagatcaaaggtgaagtcctctatctcggctactaccaatcagccttcgactgggatgatgaaacagccaaggcctccaagcagcatcgtcttaaacgctaccacagccagacctatggcaatgggtccaagtgcgaccttaatgggaggccccgggaggccgaggttcggttcctctgtgacgagggtgcaggtatctctggggactacatcgatcgcgtggacgagcccttgtcctgctcttatgtgctgaccattcgcactcctcggctctgcccccaccctctcctccggcccccacccagtgctgcaccgcaggccatcctctgtcacccttccctacagcctgaggagtacatggcctacgttcagaggcaagccgtagactcaaagcagtatggagataaaatcatagaggagctgcaagatctaggcccccaagtgtggagtgagaccaagtctggggtggcaccccaaaagatggcaggtgcgagcccgaccaaggatgacagtaaggactcagatttctggaagatgcttaatgagccagaggaccaggccccaggaggggaggaggtgccggctgaggagcaggacccaagccctgaggcagcagattcagcttctggtgctcccaatgattttcagaacaacgtgcaggtcaaagtcattcgaagccctgcggatttgattcgattcatagaggagctgaaaggtggaacaaaaaaggggaagccaaatataggccaagagcagcctgtggatgatgctgcagaagtccctcagagggaaccagagaaggaaaggggtgatccagaacggcagagagagatggaagaagaggaggatgaggatgaggatgaggatgaagatgaggatgaacggcagttactgggagaatttgagaaggaactggaagggatcctgcttccgtcagaccgagaccggctccgttcggaggtgaaggctggcatggagcgggaactggagaacatcatccaggagacagagaaagagctggacccagatgggctgaagaaggagtcagagcgggatcgggcaatgctggctctcacatccactctcaacaaactcatcaaaagactggaggaaaaacagagtccagagctggtgaagaagcacaagaaaaagagggttgtccccaaaaagcctcccccatcaccccaacctacagaggaggatcctgagcacagagtccgggtccgggtcaccaagctccgtctcggaggccctaatcaggatctgactgtcctcgagatgaaacgggaaaacccacagctgaaacaaatcgaggggctggtgaaggagctgctggagagggagggactcacagctgcagggaaaattgagatcaaaattgtccgcccatgggctgaagggactgaagagggtgcacgttggctgactgatgaggacacgagaaacctcaaggagatcttcttcaatatcttggtgccgggagctgaagaggcccagaaggaacgccagcggcagaaagagctggagagcaattaccgccgggtgtggggctctccaggtggggagggcacaggggacctggacgaatttgacttctgagaccaacactacacttgacccttcacggaatccagactcttcctggactggcttgcctcctccccacctccccaccctggaacccctgagggccaaacagcagagtggagctgagctgtggacctctcgggcaactctgtgggtgtgggggccctgggtgaatgctgctgcccctgctggcagccaccttgagacctcaccgggcctgtgatatttgctctcctgaactctcactcaatcctcttcctctcctctgtggcttttcctgttattgtcccctaatgataggatattccctgctgcctacctggagattcagtaggatcttttgagtggaggtgggtagagagagcaaggagggcaggacacttagcaggcactgagcaagcaggcccccacctgcccttagtgatgtttggagtcgttttaccctcttctattgaattgccttgggatttccttctccctttccctgcccaccctgtcccctacaatttgtgcttctgagttgaggagccttcacctctgttgctgaggaaatggtagaatgctgcctatcacctccagcacaatcccagcgaaaaaggtgtgaagcacccaccatgttcttgaacaatcaggtttctaaataaacaactggaccatca

SEQ ID NO: 950 - protein, 668 aa, Homo sapiens
MAAETLLSSLLGLLLLGLLLPASLTGGVGSLNLEELSEMRYGIEILPLPVMGGQSQSSDVVIVSSKYKQRYECRLPAGAIHFQREREEETPAYQGPGIPELLSPMRDAPCLLKTKDWWTYEFCYGRHIQQYHMEDSEIKGEVLYLGYYQSAFDWDDETAKASKQHRLKRYHSQTYGNGSKCDLNGRPREAEVRFLCDEGAGISGDYIDRVDEPLSCSYVLTIRTPRLCPHPLLRPPPSAAPQAILCHPSLQPEEYMAYVQRQAVDSKQYGDKIIEELQDLGPQVWSETKSGVAPQKMAGASPTKDDSKDSDFWKMLNEPEDQAPGGEEVPAEEQDPSPEAADSASGAPNDFQNNVQVKVIRSPADLIRFIEELKGGTKKGKPNIGQEQPVDDAAEVPQREPEKERGDPERQREMEEEEDEDEDEDEDEDERQLLGEFEKELEGILLPSDRDRLRSEVKAGMERELENIIQETEKELDPDGLKKESERDRAMLALTSTLNKLIKRLEEKQSPELVKKHKKKRVVPKKPPPSPQPTEEDPEHRVRVRVTKLRLGGPNQDLTVLEMKRENPQLKQIEGLVKELLEREGLTAAGKIEIKIVRPWAEGTEEGARWLTDEDTRNLKEIFFNILVPGAEEAQKERQRQKELESNYRRVWGSPGGEGTGDLDEFDF

SEQ ID NO: 951 - DNA, 1773 bp, Homo sapiens
  CDS (1)..(1773)
ggtaccggcggtgtcgggagcctgaacctggaggagctgagtgagatgcgttatgggatcgagatcctgccgttgcctgtcatgggagggcagagccaatcttcggacgtggtgattgtctcctctaagtacaaacagcgctatgagtgtcgcctgccagctggagctattcacttccagcgtgaaagggaggaggaaacacctgcttaccaagggcctgggatccctgagttgttgagcccaatgagagatgctccctgcttgctgaagacaaaggactggtggacatatgaattctgttatggacgccacatccagcaataccacatggaagattcagagatcaaaggtgaagtcctctatctcggctactaccaatcagccttcgactgggatgatgaaacagccaaggcctccaagcagcatcgtcttaaacgctaccacagccagacctatggcaatgggtccaagtgcgaccttaatgggaggccccgggaggccgaggttcggttcctctgtgacgagggtgcaggtatctctggggactacatcgatcgcgtggacgagcccttgtcctgctcttatgtgctgaccattcgcactcctcggctctgcccccaccctctcctccggcccccacccagtgctgcaccgcaggccatcctctgtcacccttccctacagcctgaggagtacatggcctacgttcagaggcaagccgactcaaagcagtatggagataaaatcatagaggagctgcaagatctaggcccccaagtgtggagtgagaccaagtctggggtggcaccccaaaagatggcaggtgcgagcccgaccaaggatgacagtaaggactcagatttctggaagatgcttaatgagccagaggaccaggccccaggaggggaggaggtgccggctgaggagcaggacccaagccctgaggcagcagattcagcttctggtgctcccaatgattttcagaacaacgtgcaggtcaaagtcattcgaagccctgcggatttgattcgattcatagaggagctgaaaggtggaacaaaaaaggggaagccaaatatggaccaagagcagcctgtggatgatgctgcagaagtccctcagagggaaccagagaaggaaaggggtgatccagaacggcagagagagatggaagaagaggaggatgaggatgaggatgaggatgaagatgaggatgaacggcagttactgggagaatttgagaaggaactggaagggatcctgcttccgtcagaccgagaccggctccgttcggaggtgaaggctggcatggagcgggaactggagaacatcatccaggagacagagaaagagctggacccagatgggctgaagaaggagtcagagcgggatcgggcaatgctggctctcacatccactctcaacaaacccatcaaaagactggaggaaaaacagagtccagagctggtgaagaagcacaagaaaaagagggttgtccccaaaaagcctcccccatcaccccaacctacagggaaaattgagatcaaaattgtccgcccatgggctgaagggactgaagagggtgcacgttggctgactgatgaggacacgagaaacctcaaggagatcttcttcaatatcttggtgccgggagctgaagaggcccagaaggaacgccagcggcagaaagagctggagagcaattaccgccgggtgtggggctctccaggtggggagggcacaggggacctggacgaatttgacttcgtcgac

SEQ ID NO: 952 - protein, 591 aa, Homo sapiens
GTGGVGSLNLEELSEMRYGIEILPLPVMGGQSQSSDVVIVSSKYKQRYECRLPAGAIHFQREREEETPAYQGPGIPELLSPMRDAPCLLKTKDWWTYEFCYGRHIQQYHMEDSEIKGEVLYLGYYQSAFDWDDETAKASKQHRLKRYHSQTYGNGSKCDLNGRPREAEVRFLCDEGAGISGDYIDRVDEPLSCSYVLTIRTPRLCPHPLLRPPPSAAPQAILCHPSLQPEEYMAYVQRQADSKQYGDKIIEELQDLGPQVWSETKSGVAPQKMAGASPTKDDSKDSDFWKMLNEPEDQAPGGEEVPAEEQDPSPEAADSASGAPNDFQNNVQVKVIRSPADLIRFIEELKGGTKKGKPNMDQEQPVDDAAEVPQREPEKERGDPERQREMEEEEDEDEDEDEDEDERQLLGEFEKELEGILLPSDRDRLRSEVKAGMERELENIIQETEKELDPDGLKKESERDRAMLALTSTLNKPIKRLEEKQSPELVKKHKKKRVVPKKPPPSPQPTGKIEIKIVRPWAEGTEEGARWLTDEDTRNLKEIFFNILVPGAEEAQKERQRQKELESNYRRVWGSPGGEGTGDLDEFDFVD

SEQ ID NO: 953 - DNA, 1788 bp, Homo sapiens
  CDS (1)..(1788)
tcagaattcgcccttggtaccggcggtgtcgggagcctgaacctggaggagctgagtgagatgcgttatgggatcgagatcctgccgttgcctgtcatgggagggcagagccaatcttcggacgtggtgattgtctcctctaagtacaaacagcgctatgagtgtcgcctgccagctggagctattcacttccagcgtgaaagggaggaggaaacacctgcttaccaagggcctgggatccctgagttgttgagcccaatgagagatgctccctgcttgctgaagacaaaggactggtggacatatgaattctgttatggacgccacatccagcaataccacatggaagattcagagatcaaaggtgaagtcctctatctcggctactaccaatcagccttcgactgggatgatgaaacagccaaggcctccaagcagcatcgtcttaaacgctaccacagccagacctatggcaatgggtccaagtgcgaccttaatgggaggccccgggaggccgaggttcggttcctctgtgacgagggtgcaggtatctctggggactacatcgatcgcgtggacgagcccttgtcctgctcttatgtgctgaccattcgcactcctcggctctgcccccaccctctcctccggcccccacccagtgctgcaccgcaggccatcctctgtcacccttccctacagcctgaggagtacatggcctacgttcagaggcaagccgactcaaagcagtatggagataaaatcatagaggagctgcaagatctaggcccccaagtgtggagtgagaccaagtctggggtggcaccccaaaagatggcaggtgcgagcccgaccaaggatgacagtaaggactcagatttctggaagatgcttaatgagccagaggaccaggccccaggaggggaggaggtgccggctgaggagcaggacccaagccctgaggcagcagattcagcttctggtgctcccaatgattttcagaacaacgtgcaggtcaaagtcattcgaagccctgcggatttgattcgattcatagaggagctgaaaggtggaacaaaaaaggggaagccaaatataggccaagagcagcctgtggatgatgctgcagaagtccctcagagggaaccagagaaggaaaggggtgatccagaacggcagagagagatggaagaagaggaggatgaggatgaggatgaggatgaagatgaggatgaacggcagttactgggagaatttgagaaggaactggaagggatcctgcttccgtcagaccgaggccggctccgttcggaggtgaaggctggcatggagcgggaactggaaaacatcatccaggagacagagaaagagctggacccagatgggctgaagaaggagtcagagcgggatcgggcaatgctggctctcacatccactctcaacaaactcatcaaaagactggaggaaaaacagagtccagagctggtgaagaagcacaagaaaaagagggttgtccccaaaaagcctcccccatcaccccaacctacagggaaaattgagatcaaaattgtccgcccatgggctgaagggactgaagagggtgcacgttggctgactgatgaggacacgagaaacctcaaggagatcttcttcaatatcttggtgccgggagctgaagaggcccagaaggaacgccagcggcagaaagagctggagagcaattaccgccgggtgtggggctctccaggtggggagggcacaggggacctggacgaatttgacttcgtcgac

SEQ ID NO: 954 - protein, 596 aa, Homo sapiens
SEFALGTGGVGSLNLEELSEMRYGIEILPLPVMGGQSQSSDVVIVSSKYKQRYECRLPAGAIHFQREREEETPAYQGPGIPELLSPMRDAPCLLKTKDWWTYEFCYGRHIQQYHMEDSEIKGEVLYLGYYQSAFDWDDETAKASKQHRLKRYHSQTYGNGSKCDLNGRPREAEVRFLCDEGAGISGDYIDRVDEPLSCSYVLTIRTPRLCPHPLLRPPPSAAPQAILCHPSLQPEEYMAYVQRQADSKQYGDKIIEELQDLGPQVWSETKSGVAPQKMAGASPTKDDSKDSDFWKMLNEPEDQAPGGEEVPAEEQDPSPEAADSASGAPNDFQNNVQVKVIRSPADLIRFIEELKGGTKKGKPNIGQEQPVDDAAEVPQREPEKERGDPERQREMEEEEDEDEDEDEDEDERQLLGEFEKELEGILLPSDRGRLRSEVKAGMERELENIIQETEKELDPDGLKKESERDRAMLALTSTLNKLIKRLEEKQSPELVKKHKKKRVVPKKPPPSPQPTGKIEIKIVRPWAEGTEEGARWLTDEDTRNLKEIFFNILVPGAEEAQKERQRQKELESNYRRVWGSPGGEGTGDLDEFDFVD

SEQ ID NO: 955 - DNA, 1773 bp, Homo sapiens
  CDS (1)..(1773)
ggtaccggcggtgtcgggagcctgaacctggaggagctgagtgagatgcgttatgggatcgagatcctgccgttgcctgtcatgggagggcagagccaatcttcggacgtggtgattgtctcctctaagtacaaacagcgctatgagtgtcgcctgccagctggagctattcacttccagcgtgaaagggaggaggaaacacctgcttaccaagggcctgggatccctgagttgttgagcccaatgagagatgctccctgcttgctgaagacaaaggactggtggacatatgaattctgttatggacgccacatccagcaataccacatggaagattcagagatcaaaggtgaagtcctctatctcggctactaccaatcagccttcgactgggatgatgaaacagccaaggcctccaagcagcatcgtcttaaacgctaccacagccagacctatggcaatgggtccaagtgcgaccttaatgggaggccccgggaggccgaggttcggttcctctgtgacgagggtgcaggtatctctggggactacatcgatcgcgtggacgagcccttgtcctgctcttatgtgctgaccattcgcactcctcggctctgcccccaccctctcctccggcccccacccagtgctgcaccgcaggccatcctctgtcacccttccctacagcctgaggagtacatggcctacgttcagaggcaagccgactcaaagcagtatggagataaaatcatagaggagctgcaagatctaggcccccaagtgtggagtgagaccaagtctggggtggcaccccaaaagatggcaggtgcgagcccgaccaaggatgacagtaaggactcagatttctggaagatgcttaatgagccagaggaccaggccccaggaggggaggaggtgccggctgaggagcaggacccaagccctgaggcagcagattcagcttctggtgctcccaatgattttcagaacaacgtgcaggtcaaagtcattcgaagccctgcggatttgattcgattcatagaggagctgaaaggtggaataaaaaaggggaagccaaatataggccaagagcagcctgtggatgatgctgcagaagtccctcagagggaaccagagaaggaaaggggtgatccagaacggcagagagagatggaagaagaggaggatgaggatgaggatgaggatgaagatgaggatgaacggcagttactgggagaatttgagaaggaactggaagggatcctgcttccgtcagaccgagaccggctccgttcggaggtgaaggctggcatggagcgggaactggaaaacatcatccaggagacagagaaagagctggacccagatgggctgaagaaggagtcagagcgggatcgggcaatgctggctctcacatccactctcaacaaactcatcaaaagactggaggaaaaacagagtccagagctggtgaagaagcacaagaaaaagagggttgtccccaaaaagcctcccccatcaccccaacctacagggaaaattgagatcaaaattgtccgcccatgggctgaagggactgaagagggtgcacgttggctgactgatgaggacacgagaaacctcaaggagatcttcttcaatatcttggtgccgggagctgaagaggcccagaaggaacgccagcggcagaaagagctggagagcaattaccgccgggtgtggggctctccaggtggggagggcacaggggacctggacgaatttgacttcgtcgac

SEQ ID NO: 956 - protein, 591 aa, Homo sapiens
GTGGVGSLNLEELSEMRYGIEILPLPVMGGQSQSSDVVIVSSKYKQRYECRLPAGAIHFQREREEETPAYQGPGIPELLSPMRDAPCLLKTKDWWTYEFCYGRHIQQYHMEDSEIKGEVLYLGYYQSAFDWDDETAKASKQHRLKRYHSQTYGNGSKCDLNGRPREAEVRFLCDEGAGISGDYIDRVDEPLSCSYVLTIRTPRLCPHPLLRPPPSAAPQAILCHPSLQPEEYMAYVQRQADSKQYGDKIIEELQDLGPQVWSETKSGVAPQKMAGASPTKDDSKDSDFWKMLNEPEDQAPGGEEVPAEEQDPSPEAADSASGAPNDFQNNVQVKVIRSPADLIRFIEELKGGIKKGKPNIGQEQPVDDAAEVPQREPEKERGDPERQREMEEEEDEDEDEDEDEDERQLLGEFEKELEGILLPSDRDRLRSEVKAGMERELENIIQETEKELDPDGLKKESERDRAMLALTSTLNKLIKRLEEKQSPELVKKHKKKRVVPKKPPPSPQPTGKIEIKIVRPWAEGTEEGARWLTDEDTRNLKEIFFNILVPGAEEAQKERQRQKELESNYRRVWGSPGGEGTGDLDEFDFVD

SEQ ID NO: 957 - DNA, 1938 bp, Homo sapiens
  CDS (1)..(1938)
ggtaccggcggtgtcgggagcctgaacctggaggagctgagtgagatgcgttatgggatcgagatcctgccgttgcctgtcatgggagggcagagccaatcttcggacgtggtgattgtctcctctaagtacaaacagcgctatgagtgtcgcctgccagctggagctattcacttccagcgtgaaagggaggaggaaacacctgcttaccaagggcctgggatccctgagttgttgagcccaatgagagatgctccctgcttgctgaagacaaaggactggtggacatatgaattctgttatggacgccacatccagcaataccacatggaagattcagagatcaaaggtgaagtcctctatctcggctactaccaatcagccttcgactgggatgatgaaacagccaaggcctccaagcagcatcgtcttaaacgctaccacagccagacctatggcaatgggtccaagtgcgaccttaatgggaggccccgggaggccgaggttcggttcctctgtgacgagggtgcaggtatctctggggactacatcgatcgcgtggacgagcccttgtcctgctcttatgtgctgaccattcgcactcctcggctctgcccccaccctctcctccggcccccacccagtgctgcaccgcaggccatcctctgtcacccttccctacagcctgaggagtacatggcctacgttcagaggcaagccgactcaaagcagtatggagataaaatcatagaggagctgcaagatctaggcccccaagtgtggagtgagaccaagtctggggtggcaccccaaaagatggcaggtgcgagcccgaccaaggatgacagtaaggactcagatttctggaagatgcttaatgagccagaggaccaggccccaggaggggaggaggtgccggctgaggagcaggacccaagccctgaggcagcagattcagcttctggtgctcccaatgattttcagaacaacgtgcaggtcaaagtcattcgaagccctgcggatttgattcgattcatagaggagctgaaaggtggaacaaaaaaggggaagccaaatataggccaagagcagcctgtggatgatgctgcagaagtccctcagagggaaccagagaaggaaaggggtgatccagaacggcagagagagatggaagaagaggaggatgaggatgaggatgaggatgaagatgaggatgaacggcagttactgggagaatttgagaaggaactggaagggatcctgcttccgtcagaccgagaccggctccgttcggaggtgaaggctggcatggagcgggaactggagaacatcatccaggagacagagaaagagctggacccagatgggctgaagaaggagtcagagcgggatcgggcaatgctggctctcacatccactctcaacaaactcatcaaaagactggaggaaaaacagagtccagagctggtgaagaagcacaagaaaaagagggttgtccccaaaaagcctcccccatcaccccaacctacagaggaggatcctgagcacagagtccgggtccgggtcaccaagctccgtctcggaggccctaatcaggatctgactgtcctcgagatgaaacgggaaaacccacagctgaaacaaatcgaggggctggtgaaggagctgctggagagggagggactcacagctgcagggaaaattgagatcaaaattgtccgcccatgggctgaagggactgaagagggtgcacgttggctgactgatgaggacacgagaaacctcaaggagatcttcttcaatatcttggtgccgggagctgaagaggcccagaaggaacgccagcggcagaaagagctggagagcaattaccgccgggtgtggggctctccaggtggggagggcacaggggacctggacgaatttgacttcgtcgac

SEQ ID NO: 958 - protein, 646 aa, Homo sapiens
GTGGVGSLNLEELSEMRYGIEILPLPVMGGQSQSSDVVIVSSKYKQRYECRLPAGAIHFQREREEETPAYQGPGIPELLSPMRDAPCLLKTKDWWTYEFCYGRHIQQYHMEDSEIKGEVLYLGYYQSAFDWDDETAKASKQHRLKRYHSQTYGNGSKCDLNGRPREAEVRFLCDEGAGISGDYIDRVDEPLSCSYVLTIRTPRLCPHPLLRPPPSAAPQAILCHPSLQPEEYMAYVQRQADSKQYGDKIIEELQDLGPQVWSETKSGVAPQKMAGASPTKDDSKDSDFWKMLNEPEDQAPGGEEVPAEEQDPSPEAADSASGAPNDFQNNVQVKVIRSPADLIRFIEELKGGTKKGKPNIGQEQPVDDAAEVPQREPEKERGDPERQREMEEEEDEDEDEDEDEDERQLLGEFEKELEGILLPSDRDRLRSEVKAGMERELENIIQETEKELDPDGLKKESERDRAMLALTSTLNKLIKRLEEKQSPELVKKHKKKRVVPKKPPPSPQPTEEDPEHRVRVRVTKLRLGGPNQDLTVLEMKRENPQLKQIEGLVKELLEREGLTAAGKIEIKIVRPWAEGTEEGARWLTDEDTRNLKEIFFNILVPGAEEAQKERQRQKELESNYRRVWGSPGGEGTGDLDEFDFVD

SEQ ID NO: 959 - DNA, 1938 bp, Homo sapiens
  CDS (1)..(1938)
ggtaccggcggtgtcgggagcctgaacctggaggagctgagtgagatgcgttatgggatcgagatcctgccgttgcctgtcatgggagggcagagccaatcttcggacgtggtgattgtctcctctaagtacaaacagcgctatgagtgtcgcctgccagctggagctattcacttccagcgtgaaagggaggaggaaacacctgcttaccaagggcctgggatccctgagttgttgagcccaatgagagatgctccctgcttgctgaagacaaaggactggtggacatatgaattctgttatggacgccacatccagcaataccacatggaagattcagagatcaaaggtgaagtcctctatctcggctactaccaatcagccttcgactgggatgatgaaacagccaaggcctccaagcagcatcgtcttaaacgctaccacagccagacctatggcaatgggtccaagtgcgaccttaatgggaggccccgggaggccgaggttcggttcctctgtgacgagggtgcaggtatctctggggactacatcgatcgcgtggacgagcccttgtcctgctcttatgtgctgaccattcgcactcctcggctctgcccccaccctctcctccggcccccacccagtgctgcaccgcaggccatcctctgtcacccttccctacagcctgaggagtacatggcctacgttcagaggcaagccgactcaaagcagtatggagataaaatcatagaggagctgcaagatctaggcccccaagtgtggagtgagaccaagtctggggtggcaccccaaaagatggcaggtgcgagcccgaccaaggatgacagtaaggactcagatttctggaagatgcttaatgagccagaggaccaggccccaggaggggaggaggtgccggctgaggagcaggacccaagccctgaggcagcagattcagcttctggtgctcccaatgattttcagaacaacgtgcaggtcaaagtcattcgaagccctgcggatttgattcgattcatagaggagctgaaaggtggaacaaaaaaggggaagccaaatataggccaagagcagcctgtggatgatgctgcagaagtccctcagagggaaccagagaaggaaaggggtgatccagaacggcagagagagatggaagaagaggaggatgaggatgaggatgaggatgaagatgaggatgaacggcagttactgggagaatttgagaaggaactggaagggatcctgcttccgtcagaccgagaccggctccgttcggaggtgaaggctggcatggagcgggaactggaaaacatcatccaggagacagagaaagagctggacccagatgggctgaagaaggagtcagagcgggatcgggcaatgctggctctcacatccactctcaacaaactcatcaaaagactggaggaaaaacagagtccagagctggtgaagaagcacaagaaaaagagggttgtccccaaaaagcctcccccatcaccccaacctacagaggaggatcctgagcacagagtccgggtccgggtcaccaagctccgtctcggaggccctaatcaggatctgactgtcctcgagatgaaacgggaaaacccacagctgaaacaaatcgaggggctggtgaaggagctgctggagagggagggactcacagctgcagggaaaattgagatcaaaattgtccgcccatgggctgaagggactgaagagggtgcacgttggctgactgatgaggacacgagaaacctcaaggagatcttcttcaatatcttggtgccgggagctgaagaggcccagaaggaacgccagcggcagaaagagctggagagcaattaccgccgggtgtggggctctccaggtggggagggcacaggggacctggacgaatttgacttcgtcgac

SEQ ID NO: 960 - protein, 646 aa, Homo sapiens; identical to SEQ ID NO: 958

SEQ ID NO: 961 - DNA, 1938 bp, Homo sapiens; identical to SEQ ID NO: 957
  CDS (7)..(1932)

SEQ ID NO: 962 - protein, 642 aa, Homo sapiens
GGVGSLNLEELSEMRYGIEILPLPVMGGQSQSSDVVIVSSKYKQRYECRLPAGAIHFQREREEETPAYQGPGIPELLSPMRDAPCLLKTKDWWTYEFCYGRHIQQYHMEDSEIKGEVLYLGYYQSAFDWDDETAKASKQHRLKRYHSQTYGNGSKCDLNGRPREAEVRFLCDEGAGISGDYIDRVDEPLSCSYVLTIRTPRLCPHPLLRPPPSAAPQAILCHPSLQPEEYMAYVQRQADSKQYGDKIIEELQDLGPQVWSETKSGVAPQKMAGASPTKDDSKDSDFWKMLNEPEDQAPGGEEVPAEEQDPSPEAADSASGAPNDFQNNVQVKVIRSPADLIRFIEELKGGTKKGKPNIGQEQPVDDAAEVPQREPEKERGDPERQREMEEEEDEDEDEDEDEDERQLLGEFEKELEGILLPSDRDRLRSEVKAGMERELENIIQETEKELDPDGLKKESERDRAMLALTSTLNKLIKRLEEKQSPELVKKHKKKRVVPKKPPPSPQPTEEDPEHRVRVRVTKLRLGGPNQDLTVLEMKRENPQLKQIEGLVKELLEREGLTAAGKIEIKIVRPWAEGTEEGARWLTDEDTRNLKEIFFNILVPGAEEAQKERQRQKELESNYRRVWGSPGGEGTGDLDEFDF

SEQ ID NO: 963 - DNA, 1773 bp, Homo sapiens; identical to SEQ ID NO: 955
  CDS (7)..(1767)

SEQ ID NO: 964 - protein, 587 aa, Homo sapiens
GGVGSLNLEELSEMRYGIEILPLPVMGGQSQSSDVVIVSSKYKQRYECRLPAGAIHFQREREEETPAYQGPGIPELLSPMRDAPCLLKTKDWWTYEFCYGRHIQQYHMEDSEIKGEVLYLGYYQSAFDWDDETAKASKQHRLKRYHSQTYGNGSKCDLNGRPREAEVRFLCDEGAGISGDYIDRVDEPLSCSYVLTIRTPRLCPHPLLRPPPSAAPQAILCHPSLQPEEYMAYVQRQADSKQYGDKIIEELQDLGPQVWSETKSGVAPQKMAGASPTKDDSKDSDFWKMLNEPEDQAPGGEEVPAEEQDPSPEAADSASGAPNDFQNNVQVKVIRSPADLIRFIEELKGGIKKGKPNIGQEQPVDDAAEVPQREPEKERGDPERQREMEEEEDEDEDEDEDEDERQLLGEFEKELEGILLPSDRDRLRSEVKAGMERELENIIQETEKELDPDGLKKESERDRAMLALTSTLNKLIKRLEEKQSPELVKKHKKKRVVPKKPPPSPQPTGKIEIKIVRPWAEGTEEGARWLTDEDTRNLKEIFFNILVPGAEEAQKERQRQKELESNYRRVWGSPGGEGTGDLDEFDF

SEQ ID NO: 965 - DNA, 2702 bp, Homo sapiens
  CDS (86)..(2035)
ttgcactctcccacacccttttcttttcgtccgctcttcgcttatttctcccgccgtctcctctgcataagaaggggaacgaaagatggcggcggaaacgctgctgtccagtttgttaggactgctgcttctgggactcctgttacccgcaagtctgaccggcggtgtcgggagcctgaacctggaggagctgagtgagatgcgttatgggatcgagatcctgccgttgcctgtcatgggagggcagagccaatcttcggacgtggtgattgtctcctctaagtacaaacagcgctatgagtgtcgcctgccagctggagctattcacttccagcgtgaaagggaggaggaaacacctgcttaccaagggcctgggatccctgagttgttgagcccaatgagagatgctccctgcttgctgaagacaaaggactggtggacatatgaattctgttatggacgccacatccagcaataccacatggaagattcagagatcaaaggtgaagtcctctatctcggctactaccaatcagccttcgactgggatgatgaaacagccaaggcctccaagcagcatcgtcttaaacgctaccacagccagacctatggcaatgggtccaagtgcgaccttaatgggaggccccgggaggccgaggttcggttcctctgtgacgagggtgcaggtatctctggggactacatcgatcgcgtggacgagcccttgtcctgctcttatgtgctgaccattcgcactcctcggctctgcccccaccctctcctccggcccccacccagtgctgcaccacaggccatcctctgtcacccttccctacagcctgaggagtacatggcctacgttcagaggcaagccgactcaaagcagtatggagataaaatcatagaggagctgcaagatctaggcccccaagtgtggagtgagaccaagtctggggtggcaccccaaaagatggcaggtgcgagcccgaccaaggatgacagtaaggactcagatttctggaagatgcttaatgagccagaggaccaggccccaggaggggaggaggtgccggctgaggagcaggacccaagccctgaggcagcagattcagcttctggtgctcccaatgattttcagaacaacgtgcaggtcaaagtcattcgaagccctgcggatttgattcgattcatagaggagctgaaaggtggaacaaaaaaggggaagccaaatataggccaagagcagcctgtggatgatgctgcagaagtccctcagagggaaccagagaaggaaaggggtgatccagaacggcagagagagatggaagaagaggaggatgaggatgaggataagatgaggatgaacggcagttactggggagaatttgagaaggaactggaagggatcctgcttccgtcagaccgagaccggctccgttcggagacagagaaagagctggacccagatgggctgaagaaggagtcagagcgggatcgggcaatgctggctctcacatccactctcaacaaactcatcaaaagactggaggaaaaacagagtccagagctggtgaagaagcacaagaaaaagagggttgtccccaaaaagcctcccccatcaccccaacctacagaggaggatcctgagcacagagtccgggtccgggtcaccaagctccgtctcggaggccctaatcaggatctgactgtcctcgagatgaaacgggaaaacccacagctgaaacaaatcgaggggctggtgaaggagctgctggagagggagggactcacagctgcagggaaaattgagatcaaaattgtccgcccatgggctgaagggactgaagagggtgcacgttggctgactgatgaggacacgagaaacctcaaggagatcttcttcaatatcttggtgccgggagctgaagaggcccagaaggaacgccagcggcagaaagagctggagagcaattaccgccgggtgtggggctctccaggtggggagggcacaggggacctggacgaatttgacttctgagaccaacactacacttgacccttcacggaatccagactcttcctggactggcttgcctcctccccacctccccaccctggaacccctgagggccaaacagcagagtggagctgagctgtggacctctcgggcaactctgtgggtgtgggggccctgggtgaatgctgctgcccctgctggcagccaccttgagacctcaccgggcctgtgatatttgctctcctgaactctcactcaatcctcttcctctcctctgtggcttttcctgttattgtcccctaatgataggatattccctgctgcctacctggagattcagtaggatcttttgagtggaggtgggtagagagagcaaggagggcaggacacttagcaggcactgagcaagcaggcccccacctgcccttagtgatgtttggagtcgttttaccctcttctatggaattgcctgtggattccttctcccttccctgcccaccgtgtcctacaattgtgctctgagtgagagccttcctctctgctaggaaggttatgtgccttactccgcaatcggaaagttagccacgttctaatcgttatacaaggctaaaaaaaataaatatttatacccgtttttccctgatttatttttaaatattatattatttttaatataatttgtggg

SEQ ID NO: 966 - protein, 650 aa, Homo sapiens
MAAETLLSSLLGLLLLGLLLPASLTGGVGSLNLEELSEMRYGIEILPLPVMGGQSQSSDVVIVSSKYKQRYECRLPAGAIHFQREREEETPAYQGPGIPELLSPMRDAPCLLKTKDWWTYEFCYGRHIQQYHMEDSEIKGEVLYLGYYQSAFDWDDETAKASKQHRLKRYHSQTYGNGSKCDLNGRPREAEVRFLCDEGAGISGDYIDRVDEPLSCSYVLTIRTPRLCPHPLLRPPPSAAPQAILCHPSLQPEEYMAYVQRQADSKQYGDKIIEELQDLGPQVWSETKSGVAPQKMAGASPTKDDSKDSDFWKMLNEPEDQAPGGEEVPAEEQDPSPEAADSASGAPNDFQNNVQVKVIRSPADLIRFIEELKGGTKKGKPNIGQEQPVDDAAEVPQREPEKERGDPERQREMEEEEDEDEDKMRMNGSYWGEFEKELEGILLPSDRDRLRSETEKELDPDGLKKESERDRAMLALTSTLNKLIKRLEEKQSPELVKKHKKKRVVPKKPPPSPQPTEEDPEHRVRVRVTKLRLGGPNQDLTVLEMKRENPQLKQIEGLVKELLEREGLTAAGKIEIKIVRPWAEGTEEGARWLTDEDTRNLKEIFFNILVPGAEEAQKERQRQKELESNYRRVWGSPGGEGTGDLDEFDF

SEQ ID NO: 967 - DNA, 2739 bp, Homo sapiens
  CDS (86)..(2089)
ttgcactctcccacacccttttcttttcgtccgctcttcgcttatttctcccgccgtctcctctgcataagaaggggaacgaaagatggcggcggaaacgctgctgtccagtttgttaggactgctgcttctgggactcctgttacccgcaagtctgaccggcggtgtcgggagcctgaacctggaggagctgagtgagatgcgttatgggatcgagatcctgccgttgcctgtcatgggagggcagagccaatcttcggacgtggtgattgtctcctctaagtacaaacagcgctatgagtgtcgcctgccagctggagctattcacttccagcgtgaaagggaggaggaaacacctgcttaccaagggcctgggatccctgagttgttgagcccaatgagagatgctccctgcttgctgaagacaaaggactggtggacatatgaattctgttatggacgccacatccagcaataccacatggaagattcagagatcaaaggtgaagtcctctatctcggctactaccaatcagccttcgactgggatgatgaaacagccaaggcctccaagcagcatcgtcttaaacgctaccacagccagacctatggcaatgggtccaagtgcgaccttaatgggaggccccgggaggccgaggttcggttcctctgtgacgagggtgcaggtatctctggggactacatcgatcgcgtggacgagcccttgtcctgctcttatgtgctgaccattcgcactcctcggctctgcccccaccctctcctccggcccccacccagtgctgcaccgcaggccatcctctgtcacccttccctacagcctgaggagtacatggcctacgttcagaggcaagccgtagactcaaagcagtatggagataaaatcatagaggagctgcaagatctaggcccccaagtgtggagtgagaccaagtctggggtggcaccccaaaagatggcaggtgcgagcccgaccaaggatgacagtaaggactcagatttctggaagatgcttaatgagccagaggaccaggccccaggaggggaggaggtgccggctgaggagcaggacccaagccctgaggcagcagattcagcttctggtgctcccaatgattttcagaacaacgtgcaggtcaaagtcattcgaagccctgcggatttgattcgattcatagaggagctgaaaggtggaacaaaaaaggggaagccaaatataggccaagagcagcctgtggatgatgctgcagaagtccctcagagggaaccagagaaggaaaggggtgatccagaacggcagagagagatggaagaagaggaggatgaggatgaggatgaggatgaagatgaggatgaacggcagttactgggagaatttgagaaggaactggaagggatcctgcttccgtcagaccgagaccggctccgttcggaggtgaaggctggcatggagcgggaactggagaacatcatccaggagacagagaaagagctggacccagatgggctgaagaaggagtcagagcgggatcgggcaatgctggctctcacatccactctcaacaaactcatcaaaagactggaggaaaaacagagtccagagctggtgaagaagcacaagaaaaagagggttgtccccaaaaagcctcccccatcaccccaacctacagaggaggatcctgagcacagagtccgggtccgggtcaccaagctccgtctcggaggccctaatcaggatctgactgtcctcgagatgaaacgggaaaacccacagctgaaacaaatcgaggggctggtgaaggagctgctggagagggagggactcacagctgcagggaaaattgagatcaaaattgtccgcccatgggctgaagggactgaagagggtgcacgttggctgactgatgaggacacgagaaacctcaaggagatcttcttcaatatcttggtgccgggagctgaagaggcccagaaggaacgccagcggcagaaagagctggagagcaattaccgccgggtgtggggctctccaggtggggagggcacaggggacctggacgaatttgacttctgagaccaacactacacttgacccttcacggaatccagactcttcctggactggcttgcctcctccccacctccccaccctggaacccctgagggccaaacagcagagtggagctgagctgtggacctctcgggcaactctgtgggtgtgggggccctgggtgaatgctgctgcccctgctggcagccaccttgagacctcaccgggcctgtgatatttgctctcctgaactctcactcaatcctcttcctctcctctgtggcttttcctgttattgtcccctaatgataggatattccctgctgcctacctggagattcagtaggatcttttgagtggaggtgggtagagagagcaaggagggcaggacacttagcaggcactgagcaagcaggcccccacctgcccttagtgatgtttggagtcgttttaccctcttctattgaattgccttgggatttccttctccctttccctgcccaccctgtcccctacaatttgtgcttttgagttgaggagccttcacctctgttgctgaggaaatggtagaatgctgcctatcacctccagcacaatcccagcgaaaaaggtgtgaagcacccaccatgttcttgaacaatcaggtttctaaataaacaactggaccatca

SEQ ID NO: 968 - protein, 668 aa, Homo sapiens; identical to SEQ ID NO: 950

SEQ ID NO: 969 - DNA, 2739 bp, Homo sapiens
  CDS (86)..(2089)
ttgcactctcccacacccttttcttttcgtccgctcttcgcttatttctcccgccgtctcctctgcataagaaggggaacgaaagatggcggcggaaacgctgctgtccagtttgttaggactgctgcttctgggactcctgttacccgcaagtctgaccggcggtgtcgggagcctgaacctggaggagctgagtgagatgcgttatgggatcgagatcctgccgttgcctgtcatgggagggcagagccaatcttcggacgtggtgattgtctcctctaagtacaaacagcgctatgagtgtcgcctgccagctggagctattcacttccagcgtgaaagggaggaggaaacacctgcttaccaagggcctgggatccctgagttgttgagcccaatgagagatgctccctgcttgctgaagacaaaggactggtggacatatgaattctgttatggacgccacatccagcaataccacatggaagattcagagatcaaaggtgaagtcctctatctcggctactaccaatcagccttcgactgggatgatgaaacagccaaggcctccaagcagcatcgtcttaaacgctaccacagccagacctatggcaatgggtccaagtgcgaccttaatgggaggccccgggaggccgaggttcggttcctctgtgacgagggtgcaggtatctctggggactacatcgatcgcgtggacgagcccttgtcctgctcttatgtgctgaccattcgcactcctcggctctgcccccaccctctcctccggcccccacccagtgctgcaccgcaggccatcctctgtcacccttccctacagcctgaggagtacatggcctacgttcagaggcaagccgtagactcaaagcagtatggagataaaatcatagaggagctgcaagatctaggcccccaagtgtggagtgagaccaagtctggggtggcaccccaaaagatggcaggtgcgagcccgaccaaggatgacagtaaggactcagatttctggaagatgcttaatgagccagaggaccaggccccaggaggggaggaggtgccggctgaggagcaggacccaagccctgaggcagcagattcagcttctggtgctcccaatgattttcagaacaacgtgcaggtcaaagtcattcgaagccctgcggatttgattcgattcatagaggagctgaaaggtggaacaaaaaaggggaagccaaatataggccaagagcagcctgtggatgatgctgcagaagtccctcagagggaaccagagaaggaaaggggtgatccagaacggcagagagagatggaagaagaggaggatgaggatgaggatgaggatgaagatgaggatgaacggcagttactgggagaatttgagaaggaactggaagggatcctgcttccgtcagaccgagaccggctccgttcggaggtgaaggctggcatggagcgggaactggagaacatcatccaggagacagagaaagagctggacccagatgggctgaagaaggagtcagagcgggatcgggcaatgctggctctcacatccactctcaacaaactcatcaaaagactggaggaaaaacagagtccagagctggtgaagaagcacaagaaaaagagggttgtccccaaaaagcctcccccatcaccccaacctacagaggaggatcctgagcacagagtccgggtccgggtcaccaagctccgtctcggaggccctaatcaggatctgactgtcctcgagatgaaacgggaaaacccacagctgaaacaaatcgaggggctggtgaaggagctgctggagagggagggactcacagctgcagggaaaattgagatcaaaattgtccgcccatgggctgaagggactgaagagggtgcacgttggctgactgatgaggacacgagaaacctcaaggagatcttcttcaatatcttggtgccgggagctgaagaggcccagaaggaacgccagcggcagaaagagctggagagcaattaccgccgggtgtggggctctccaggtggggagggcacaggggacctggacgaatttgacttctgagaccaacactacacttgacccttcacggaatccagactcttcctggactggcttgcctcctccccacctccccaccctggaacccctgagggccaaacagcagagtggagctgagctgtggacctctcgggcaactctgtgggtgtgggggccctgggtgaatgctgctgcccctgctggcagccaccttgagacctcaccgggcctgtgatatttgctctcctgaactctcactcaatcctcttcctctcctctgtggcttttcctgttattgtcccctaatgataggatattccctgctgcctacctggagattcagtaggatcttttgagtggaggtgggtagagagagcaaggagggcaggacacttagcaggcactgagcaagcaggcccccacctgcccttagtgatgtttggagtcgttttaccctcttctattgaattgccttgggatttccttctccctttccctgcccaccctgtcccctacaatttgtgcttctgagttgaggagccttcacctctgttgctgaggaaatggtagaatgctgcctatcacctccagcacaatcccagtgaaaaaggtgtgaagcacccaccatgttcttgaacaatcaggtttctaaataaacaactggaccatca

SEQ ID NO: 970 - protein, 668 aa, Homo sapiens; identical to SEQ ID NO: 950

SEQ ID NO: 971 - DNA, 1311 bp, Homo sapiens
  CDS (19)..(1281)
ggagctcccacactttcaatggggaggcccacccagtggccgagcctgctgctgctcctgctgttgccggggcccccgcccgtcgccggcttggaagacgctgccttcccccacctgggggagagcttgcagcccctgccccgggcctgtcccctgcgctgctcctgcccccgagtcgacactgtggactgtgatggcttggaccttcgagtgttcccggacaacatcaccagagccgctcagcacctctccctgcagaacaaccagctccaggaactcccctacaatgagctgtcccgcctcagtggcctgcgaaccctcaacctccacaacaacctcatctcctccgaaggcctgcctgacgaggccttcgagtccctcacccagctgcagcacctctgcgtggctcacaacaagaacaatctcatctccaaggtgccccgaggagccctgagccgccagactcaactccgtgagctctacctccagcacaaccagctgacagacagtggcctggatgccaccaccttcagcaagctgcatagccttgaatacctggatctctcccacaaccagctgaccacagtgcccgccggcctgccccggaccctggctatcctgcacctgggccgcaaccgcatccggcaggtggaggcggctcggctgcacggggcgcgtggtctgcgctatttgttgctgcagcacaaccagctggggagctcagggctgcccgccggggctctgcggccgctgcggggcctgcacacgctgcacctcgatggcaatgggctggaccgcgtgcctccagccctgccccgccgcctgcgtgccctggtgctgccccacaaccacgtggccgcgctgggtgcccgtgacctggtcgccacaccgggcctgacggagcttaacctggcctataaccgcctggccagcgcccgtgtgcaccaccgggccttccgccggttgcgtgccctgcgcagcctcgacctggcagggaatcagctaacccggctgcccatgggcctgcccactggcctgcgcaccctgcagctgcaacgcaaccagctgcggatgctcgagcccgagcctctggccggcctggaccaactgcgggagctcagcctggcgcacaaccggctccgggtcggcgacatcgggccaggcacctggcatgagctccaagccctccaggtcaggcacaggctggttagccacactgtccccagggcccctccatccccctgcctgccctgccacgtcccaaacattctagttagctggtaaagcaatcagaacaagaaaatgataaga

SEQ ID NO: 972 - protein, 421 aa, Homo sapiens
MGRPTQWPSLLLLLLLPGPPPVAGLEDAAFPHLGESLQPLPRACPLRCSCPRVDTVDCDGLDLRVFPDNITRAAQHLSLQNNQLQELPYNELSRLSGLRTLNLHNNLISSEGLPDEAFESLTQLQHLCVAHNKNNLISKVPRGALSRQTQLRELYLQHNQLTDSGLDATTFSKLHSLEYLDLSHNQLTTVPAGLPRTLAILHLGRNRIRQVEAARLHGARGLRYLLLQHNQLGSSGLPAGALRPLRGLHTLHLDGNGLDRVPPALPRRLRALVLPHNHVAALGARDLVATPGLTELNLAYNRLASARVHHRAFRRLRALRSLDLAGNQLTRLPMGLPTGLRTLQLQRNQLRMLEPEPLAGLDQLRELSLAHNRLRVGDIGPGTWHELQALQVRHRLVSHTVPRAPPSPCLPCHVPNILVSW

SEQ ID NO: 973 - DNA, 1278 bp, Homo sapiens
  CDS (1)..(1278)
ggatccaccatggggaggcccacccagtggccgagcctgctgctgctcctgctgttgccggggcccccgcccgtcgccggcttggaagacgctgccttcccccacctgggggagagcttgcagcccctgccccgggcctgtcccctgcgctgctcctgcccccgagtcgacactgtggactgtgatggcttggaccttcgagtgttcccggacaacatcaccagagccgctcagcacctctccctgcagaacaaccagctccaggaactcccctacaatgagctgtcccgcctcagtggcctgcgaaccctcaacctccacaacaacctcatctcctccgaaggcctgcctgacgaggccttcgagtccctcacccagctgcagcacctctgcgtggctcacaacaagaacaatctcatctccaaggtgccccgaggagccctgagccgccagactcaactccgtgagctctacctccagcacaaccagctgacagacagtggcctggatgccaccaccttcagcaagctgcatagccttgaatacctggatctctcccacaaccagctgaccacagtgcccgccggcctgccccggaccctggctatcctgcacctgggccgcaaccgcatccggcaggtggaggcggctcggctgcacggggcgcgtggtctgcgctatttgttgctgcagcacaaccagctggggagctcagggctgcccgccggggctctgcggccgctgcggggcctgcacacgctgcacctctatggcaatgggctggaccgcgtgcctccagccctgccccgccgcctgcgtgccctggtgctgccccacaaccacgtggccgcgctgggtgcccgtgacctggtcgccacaccgggcctgacggagcttaacctggcctataaccgcctggccagcgcccgtgtgcaccaccgggccttccgccggttgcgtgccctgcgcagcctcgacctggcagggaatcagctaacccggctgcccatgggcctgcccactggcctgcgcaccctgcagctgcaacgcaaccagctgcggatgctcgagcccgagcctctggccggcctggaccaactgcgggagctcagcctggcgcacaaccggctccgggtcggcgacatcgggccaggcacctggcatgagctccaagccctccaggtcaggcacaggctggttagccacactgtccccagggcccctccatccccctgcctgccctgccacgtcccaaacattctagttagctgggaattc

SEQ ID NO: 974 - protein, 426 aa, Homo sapiens
GSTMGRPTQWPSLLLLLLLPGPPPVAGLEDAAFPHLGESLQPLPRACPLRCSCPRVDTVDCDGLDLRVFPDNITRAAQHLSLQNNQLQELPYNELSRLSGLRTLNLHNNLISSEGLPDEAFESLTQLQHLCVAHNKNNLISKVPRGALSRQTQLRELYLQHNQLTDSGLDATTFSKLHSLEYLDLSHNQLTTVPAGLPRTLAILHLGRNRIRQVEAARLHGARGLRYLLLQHNQLGSSGLPAGALRPLRGLHTLHLYGNGLDRVPPALPRRLRALVLPHNHVAALGARDLVATPGLTELNLAYNRLASARVHHRAFRRLRALRSLDLAGNQLTRLPMGLPTGLRTLQLQRNQLRMLEPEPLAGLDQLRELSLAHNRLRVGDIGPGTWHELQALQVRHRLVSHTVPRAPPSPCLPCHVPNILVSWEF

SEQ ID NO: 975 - DNA, 1122 bp, Homo sapiens
  CDS (3)..(1121)
ggatccaccatggcttggaccttcgagtgttcccggacaacatcaccagagccgctcagcacctctccctgcagaacaaccagctccaggaactcccctacaatgagctgtcccgcctcagtggcctgcgaaccctcaacctccacaacaacctcatctcctccgaaggcctgcctgacgaggccttcgagtccctcacccagctgcagcacctctgcgtggctcacaacaagaacaatctcatctccaaggtgccccgaggagccctgagccgccagactcaactccgtgagctctacctccagcacaaccagctgacagacagtggcctggatgccaccaccttcagcaagctgcatagccttgaatacctggatctctcccacaaccagctgaccacagtgcccgccggcctgccccggaccctggctatcctgcacctgggccgcaaccgcatccggcaggtggaggcggctcggctgcacggggcgcgtggtctgcgctatttgttgctgcagcacaaccagctggggagctcagggctgcccgccggggctctgcggccgctgcggggcctgcacacgctgcacctctatggcaatgggctggaccgcgtgcctccagccctgccccgccgcctgcgtgccctggtgctgccccacaaccacgtggccgcgctgggtgcccgtgacctggtcgccacaccgggcctgacggagcttaacctggcctataaccgcctggccagcgcccgtgtgcaccaccgggccttccgccggttgcgtgccctgcgcagcctcgacctggcagggaatcagctaacccggctgcccatgggcctgcccactggcctgcgcaccctgcagctgcaacgcaaccagctgcggatgctcgagcccgagcctctggccggcctggaccaactgcgggagctcagcctggcgcacaaccggctccgggtcggcgacatcgggccaggcacctggcatgagctccaagccctccaggtcaggcacaggctggttagccacactgtccccagggcccctccatccccctgcctgccctgccacgtcccaaacattctagttagctgggaattcaagggcgaattccaagcac

SEQ ID NO: 976 - protein, 373 aa, Homo sapiens
IHHGLDLRVFPDNITRAAQHLSLQNNQLQELPYNELSRLSGLRTLNLHNNLISSEGLPDEAFESLTQLQHLCVAHNKNNLISKVPRGALSRQTQLRELYLQHNQLTDSGLDATTFSKLHSLEYLDLSHNQLTTVPAGLPRTLAILHLGRNRIRQVEAARLHGARGLRYLLLQHNQLGSSGLPAGALRPLRGLHTLHLYGNGLDRVPPALPRRLRALVLPHNHVAALGARDLVATPGLTELNLAYNRLASARVHHRAFRRLRALRSLDLAGNQLTRLPMGLPTGLRTLQLQRNQLRMLEPEPLAGLDQLRELSLAHNRLRVGDIGPGTWHELQALQVRHRLVSHTVPRAPPSPCLPCHVPNILVSWEFKGEFQA

SEQ ID NO: 977 - DNA, 1977 bp, Homo sapiens
  CDS (1)..(1722)
atgtggccgagcctgctgctgctcctgctgttgccggggcccccgcccgtcgccggcttggaagacgctgccttcccccacctgggggagagcttgcagcccctgccccgggcctgtcccctgcgctgctcctgcccccgagtcgacactgtggactgtgatggcttggaccttcgagtgttcccggacaacatcaccagagccgctcagcacctctccctgcagaacaaccagctccaggaactcccctacaatgagctgtcccgcctcagtggcctgcgaaccctcaacctccacaacaacctcatctcctccgaaggtctgcctgacgaggccttcgagtccctcacccagctgcagcacctctgcgtggctcacaacaagctctcagtggcccctcagtttctgccccggtccctccgtgtcgcggatctggctgccaaccaagtgatggagatcttccccctcacctttggggagaagccggcactcaggtccgtgtacctccacaacaaccagctgagcaacgctggcctgccccccgacgccttccgcggctccgaggccatcgccaccctcagcctctccaacaaccagctcagctacctgccgcccagcctgccgccctcactcgagcggctccacctgcagaacaatctcatctccaaggtgccccgaggagccctgagccgccagactcaactccgtgagctctacctccagcacaaccagctgacagacagtggcctggatgccaccaccttcagcaagctgcatagccttgaatacctggatctctcccacaaccagctgaccacagtgcccgccggcctgccccggaccctggctatcctgcacctgggccgcaaccgcatccggcaggtggaggcggctcggctgcacggggcgcgtggtctgcgctatttgttgctgcagcacaaccagctggggagctcagggctgcccgccggggctctgcggccgctgcggggcctgcacacgctgcacctctatggcaatgggctggaccgcgtgcctccagccctgccccgccgcctgcgtgccctggtgctgccccacaaccacgtggccgcgctgggtgcccgtgacctggtcgccacaccgggcctgacggagcttaacctggcctataaccgcctggccagcgcccgtgtgcaccaccgggccttccgccggttgcgtgccctgcgcagcctcgacctggcagggaatcagctaacccggctgcccatgggcctgcccactggcctgcgcaccctgcagctgcaacgcaaccagctgcggatgctcgagcccgagcctctggccggcctggaccaactgcgggagctcagcctggcgcacaaccggctccgggtcggcgacatcgggccaggcacctggcatgagctccaagccctccagatgctggacctcagccacaatgagctgtcctttgtgcccccggacctgcctgaggccctagaggagctgcacctcgagggcaaccgcatcggccacgtgggccccgaggccttcctcagcacaccccgcctgcgtgccctcttcctcagggccaacaggcttcacatgacgagcatcgcggctgaggccttcctggggctcccaaacctgcgtgtggtggacacggcagggaatccggagcaggtcctgatccggctgcctcccaccaccccacgtgggccacgggcagggggcccctgatcctagagaggcccagcagagcagctcagactcctgggactccgctgggccgtggactgaggagacaacgcccaccaggggcccttggtctggctctcctgggcctccagggctgggcctgctctgcctgccactggccgagacacagaggcacacagctggcatactccaggctcacagaccacgccggcctggcgggacacaccctaccccaaactcccaacacagatggaggcagcaacaataaagcca

SEQ ID NO: 978 - protein, 574 aa, Homo sapiens
MWPSLLLLLLLPGPPPVAGLEDAAFPHLGESLQPLPRACPLRCSCPRVDTVDCDGLDLRVFPDNITRAAQHLSLQNNQLQELPYNELSRLSGLRTLNLHNNLISSEGLPDEAFESLTQLQHLCVAHNKLSVAPQFLPRSLRVADLAANQVMEIFPLTFGEKPALRSVYLHNNQLSNAGLPPDAFRGSEAIATLSLSNNQLSYLPPSLPPSLERLHLQNNLISKVPRGALSRQTQLRELYLQHNQLTDSGLDATTFSKLHSLEYLDLSHNQLTTVPAGLPRTLAILHLGRNRIRQVEAARLHGARGLRYLLLQHNQLGSSGLPAGALRPLRGLHTLHLYGNGLDRVPPALPRRLRALVLPHNHVAALGARDLVATPGLTELNLAYNRLASARVHHRAFRRLRALRSLDLAGNQLTRLPMGLPTGLRTLQLQRNQLRMLEPEPLAGLDQLRELSLAHNRLRVGDIGPGTWHELQALQMLDLSHNELSFVPPDLPEALEELHLEGNRIGHVGPEAFLSTPRLRALFLRANRLHMTSIAAEAFLGLPNLRVVDTAGNPEQVLIRLPPTTPRGPRAGGP

SEQ ID NO: 979 - DNA, 1201 bp, Homo sapiens
  CDS (2)..(1201)
caccggatccaccatgtggccgagcctgctgctgctcctgctgttgccggggcccccgcccgtcgccggtttggaagacgctgccttcccccacctgggggagagcttgcagcccctgccccgggcctgtcccctgcgctgctcctgcccccgagtcgacactgtggactgtgatggcttggaccttcgagtgttcccggacaacatcaccagagccgctcagcacctctccctgcagaacaaccagctccaggaactcccctacaatgagctgtcccgcctcagtggcctgcgaaccctcaacctccacaacaacctcatctcctccgaaggcctgcctgacgaggccttcgagtccctcacccagctgcagcacctctgcgtggctcacaacaagctctcagtggcccctcagtttctgccccggtccctccgtgtcgcggatctggctgccaaccaagtgatggagatcttccccctcacctttggggagaagccggcactcaggtccgtgtacctccacaacaaccagctgagcaacgctggcctgccccccgacgccttccgcggctccgaggccatcgccaccctcagcctctccaacaaccagctcagctacctgccgcccagcctgccgccctcactcgagcggctccacctgcagaacaatctcatctccaaggtgccccgaggagccctgagccgccagactcaactccgtgagctctacctccagcacaaccagctgacagacagtggcctggatgccaccaccttcagcaagctgcatagccttgaatacctggatctctcccacaaccagctgaccacagtgcccgccggcctgccccggaccctggctatcctgcacctgggccgcaaccgcatccggcagatgctggacctcagccacaatgagctgtcctttgtgcccccggacctgcctgaggccctagaggagctgcacctcgagggcaaccgcatcggccacgtgggccccgaggccttcctcagcacaccccgcctgcgtgccctcttcctcagggccaacaggcttcacatgacgagcatcgcggctgaggccttcctggggctcccaaacctgcgtgtggtggacacggcagggaatccggagcaggtcctgatccggctgcctcccaccaccccacgtgggccacgggcagggggccccaagcttggc

SEQ ID NO: 980 - protein, 400 aa, Homo sapiens
TGSTMWPSLLLLLLLPGPPPVAGLEDAAFPHLGESLQPLPRACPLRCSCPRVDTVDCDGLDLRVFPDNITRAAQHLSLQNNQLQELPYNELSRLSGLRTLNLHNNLISSEGLPDEAFESLTQLQHLCVAHNKLSVAPQFLPRSLRVADLAANQVMEIFPLTFGEKPALRSVYLHNNQLSNAGLPPDAFRGSEAIATLSLSNNQLSYLPPSLPPSLERLHLQNNLISKVPRGALSRQTQLRELYLQHNQLTDSGLDATTFSKLHSLEYLDLSHNQLTTVPAGLPRTLAILHLGRNRIRQMLDLSHNELSFVPPDLPEALEELHLEGNRIGHVGPEAFLSTPRLRALFLRANRLHMTSIAAEAFLGLPNLRVVDTAGNPEQVLIRLPPTTPRGPRAGGPKLG

SEQ ID NO: 981 - DNA, 1744 bp, Homo sapiens
  CDS (2)..(1744)
caccggatccaccatgtggccgagcctgctgctgctcctgctgttgccggggcccccgcccgtcgccggcttggaagacgctgccttcccccacctgggggagagcttgcagcccctgccccgggcctgtcccctgcgctgctcctgcccccgagtcgacactgtggactgtgatggcttggaccttcgagtgttcccggacaacatcaccagagccgctcagcacctctccctgcagaacaaccagctccaggaactcccctacaatgagctgtcccgcctcagtggcctgcgaaccctcaacctccacaacaacctcatctcctccgaaggcctgcctgacgaggccttcgagtccctcacccagctgcagcacctctgcgtggctcacaacaagctctcagtggcccctcagtttctgccccggtccctccgtgtcgcggatctggctgccaaccaagtgatggagatcttccccctcacctttggggagaagccggcactcaggtccgtgtacctccacaacaaccagctgagcaacgctggcctgccccccgacgccttccgcggctccgaggccatcgccaccctcagcctctccaacaaccagctcagctacctgccgcccagcctgccgccctcactcgagcggctccacctgcagaacaatctcatctccaaggtgccccgaggagccctgagccgccagactcaactccgtgagctctacctccagcacaaccagctgacagacagtggcctggatgccaccaccttcagcaagctgcatagccttgaatacctggatctctcccacaaccagctgaccacagtgcccgccggcctgccccggaccctggctatcctgcacctgggccgcaaccgcatccggcaggtggaggcggctcggctgcacggggcgcgtggtctgcgctatttgttgctgcagcacaaccagctggggagctcagggctgcccgccggggctctgcggccgctgcggggcctgcacacgctgcacctctatggcaatgggctggaccgcgtgcctccagccctgccccgccgcctgcgtgccctggtgctgccccacaaccacgtggccgcgctgggtgcccgtgacctggtcgccacaccgggcctgacggagcttaacctggcctataaccgcctggccagcgcccgtgtgcaccaccgggccttccgccggttgcgtgccctgcgcagcctcgacctggcagggaatcagctaacccggctgcccatgggcctgcccactggcctgcgcaccctgcagctgcaacgcaaccagctgcggatgctcgagcccgagcctctggccggcctggaccaactgcgggagctcagcctggcgcacaaccggctccgggtcggcgacatcgggccaggcacctggcatgagctccaagccctccagatgctggacctcagccacaatgagctgtcctttgtgcccccggacctgcctgaggccctggaggagctgcacctcgagggcaaccgcatcggccacgtgggccccgaggccttcctcagcacaccccgcctgcgtgccctcttcctcagggccaacaggcttcacatgacgagcatcgcggctgaggccttcctggggctcccaaacctgcgtgtggtggacacggcagggaatccggagcaggtcctgatccggctgcctcccaccaccccacgtgggccacgggcagggggccccaagcttggc

SEQ ID NO: 982 - protein, 581 aa, Homo sapiens
TGSTMWPSLLLLLLLPGPPPVAGLEDAAFPHLGESLQPLPRACPLRCSCPRVDTVDCDGLDLRVFPDNITRAAQHLSLQNNQLQELPYNELSRLSGLRTLNLHNNLISSEGLPDEAFESLTQLQHLCVAHNKLSVAPQFLPRSLRVADLAANQVMEIFPLTFGEKPALRSVYLHNNQLSNAGLPPDAFRGSEAIATLSLSNNQLSYLPPSLPPSLERLHLQNNLISKVPRGALSRQTQLRELYLQHNQLTDSGLDATTFSKLHSLEYLDLSHNQLTTVPAGLPRTLAILHLGRNRIRQVEAARLHGARGLRYLLLQHNQLGSSGLPAGALRPLRGLHTLHLYGNGLDRVPPALPRRLRALVLPHNHVAALGARDLVATPGLTELNLAYNRLASARVHHRAFRRLRALRSLDLAGNQLTRLPMGLPTGLRTLQLQRNQLRMLEPEPLAGLDQLRELSLAHNRLRVGDIGPGTWHELQALQMLDLSHNELSFVPPDLPEALEELHLEGNRIGHVGPEAFLSTPRLRALFLRANRLHMTSIAAEAFLGLPNLRVVDTAGNPEQVLIRLPPTTPRGPRAGGPKLG

SEQ ID NO: 983 - DNA, 1744 bp, Homo sapiens
  CDS (2)..(1744)
caccggatccaccatgtggccgagcctgctgctgctcctgctgttgccggggcccccgcccgtcgccggcttggaagacgctgccttcccccacctgggggagagcttgcagcccctgccccgggcctgtcccctgcgctgctcctgcccccgagtcgacactgtggactgtgatggcttggaccttcgagtgttcccggacaacatcaccagagccgctcagcacctctccctgcagaacaaccagctccaggaactcccctacaatgagctgtcccgcctcagtggcctgcgaaccctcaacctccacaacaacctcatctcctccgaaggcctgcctgacgaggccttcgagtccctcacccagctgcagcacctctgcgtggctcacaacaagctctcagtggcccctcagtttctgccccggtccctccgtgtcgcggatctggctgccaaccaagtgatggagatcttccccctcacctttggggagaagccggcactcaggtccgtgtacctccacaacaaccagctgagcaacgctggcctgccccccgacgccttccgcggctccgaggccatcgccaccctcagcctctccaacaaccagctcagctacctgccgcccagcctgccgccctcactcgagcggctccacctgcagaacaatctcatctccaaggtgccccgaggagccctgagccgccagactcaactccgtgagctctacctccagcacaaccagctgacagacagtggcctggatgccaccaccttcagcaagctgcatagccttgaatacctggatctctcccacaaccagctgaccacagtgcccgccggcctgccccggaccctggctatcctgcacctgggccgcaaccgcatccggcaggtggaggcggctcggctgcacggggcgcgtggtctgcgctatttgttgctgcagcacaaccagctggggagctcagggctgcccgccggggctctgcggccgctgcggggcctgcacacgctgcacctctatggcaatgggctggaccgcgtgcctccagccctgccccgccgcctgcgtgccctggtgctgccccacaaccacgtggccgcgctgggtgcccgtgacctggtcgccacaccgggcctgacggagcttaacctggcctataaccgcctggccagcgcccgtgtgcaccaccgggccttccgccggttgcgtgccctgcgcagcctcgacctggcagggaatcagctaacccggctgcccatgggcctgcccactggcctgcgcaccctgcagctgcaacgcaaccagctgcggatgctcgagcccgagcctctggccggcctggaccaactgcgggagctcagcctggcgcacaaccggctccgggtcggcgacatcgggccaggcacctggcatgagctccaagccctccagatgctggacctcagccacaatgagctgtcctttgtgcccccggacctgcctgaggccctggaggagctgcacctcgagggcaaccgcatcggccacgtgggccccgaggccttcctcagcacaccccgcctgcgtgccctcttcctcagggccaacaggcttcacatgacgagcatcgcggctgaggccttcctggggctcccaaacctgcgtgtggtggacacggcagggaatccggagcaggtcctgatccggctgcctcccaccaccccacgtgggccacgggcagggggccccgaattcggc

SEQ ID NO: 984 - protein, 581 aa, Homo sapiens
TGSTMWPSLLLLLLLPGPPPVAGLEDAAFPHLGESLQPLPRACPLRCSCPRVDTVDCDGLDLRVFPDNITRAAQHLSLQNNQLQELPYNELSRLSGLRTLNLHNNLISSEGLPDEAFESLTQLQHLCVAHNKLSVAPQFLPRSLRVADLAANQVMEIFPLTFGEKPALRSVYLHNNQLSNAGLPPDAFRGSEAIATLSLSNNQLSYLPPSLPPSLERLHLQNNLISKVPRGALSRQTQLRELYLQHNQLTDSGLDATTFSKLHSLEYLDLSHNQLTTVPAGLPRTLAILHLGRNRIRQVEAARLHGARGLRYLLLQHNQLGSSGLPAGALRPLRGLHTLHLYGNGLDRVPPALPRRLRALVLPHNHVAALGARDLVATPGLTELNLAYNRLASARVHHRAFRRLRALRSLDLAGNQLTRLPMGLPTGLRTLQLQRNQLRMLEPEPLAGLDQLRELSLAHNRLRVGDIGPGTWHELQALQMLDLSHNELSFVPPDLPEALEELHLEGNRIGHVGPEAFLSTPRLRALFLRANRLHMTSIAAEAFLGLPNLRVVDTAGNPEQVLIRLPPTTPRGPRAGGPEFG

SEQ ID NO: 985 - DNA, 1506 bp, Homo sapiens
  CDS (1)..(1503)
atgatgaacaaccagctccaggaactcccctacaatgagctgtcccgcctcagtggcctgcgaaccctcaacctccacaacaacctcatctcctccgaaggcctgcctgacgaggccttcgagtccctcacccagctgcagcacctctgcgtggctcacaacaagctctcagtggcccctcagtttctgccccggtccctccgtgtcgcggatctggctgccaaccaagtgatggagatcttccccctcacctttggggagaagccggcactcaggtccgtgtacctccacaacaaccagctgagcaacgctggcctgccccccgacgccttccgcggctccgaggccatcgccaccctcagcctctccaacaaccagctcagctacctgccgcccagcctgccgccctcactcgagcggctccacctgcagaacaatctcatctccaaggtgccccgaggagccctgagccgccagactcaactccgtgagctctacctccagcacaaccagctgacagacagtggcctggatgccaccaccttcagcaagctgcatagccttgaatacctggatctctcccacaaccagctgaccacagtgcccgccggcctgccccggaccctggctatcctgcacctgggccgcaaccgcatccggcaggtggaggcggctcggctgcacggggcgcgtggtctgcgctatttgttgctgcagcacaaccagctggggagctcagggctgcccgccggggctctgcggccgctgcggggcctgcacacgctgcacctctatggcaatgggctggaccgcgtgcctccagccctgccccgccgcctgcgtgccctggtgctgccccacaaccacgtggccgcgctgggtgcccgtgacctggtcgccacaccgggcctgacggagcttaacctggcctataaccgcctggccagcgcccgtgtgcaccaccgggccttccgccggttgcgtgccctgcgcagcctcgacctggcagggaatcagctaacccggctgcccatgggcctgcccactggcctgcgcaccctgcagctgcaacgcaaccagctgcggatgctcgagcccgagcctctggccggcctggaccaactgcgggagctcagcctggcgcacaaccggctccgggtcggcgacatcgggccaggcacctggcatgagctccaagccctccagatgctggacctcagccacaatgagctgtcctttgtgcccccggacctgcctgaggccctagaggagctgcacctcgagggcaaccgcatcggccacgtgggccccgaggccttcctcagcacaccccgcctgcgtgccctcttcctcagggccaacaggcttcacatgacgagcatcgcggctgaggccttcctggggctcccaaacctgcgtgtggtggacacggcagggaatccggagcaggtcctgatccggctgcctcccaccaccccacgtgggccacgggcagggggcccctga

SEQ ID NO: 986 - protein, 501 aa, Homo sapiens
MMNNQLQELPYNELSRLSGLRTLNLHNNLISSEGLPDEAFESLTQLQHLCVAHNKLSVAPQFLPRSLRVADLAANQVMEIFPLTFGEKPALRSVYLHNNQLSNAGLPPDAFRGSEAIATLSLSNNQLSYLPPSLPPSLERLHLQNNLISKVPRGALSRQTQLRELYLQHNQLTDSGLDATTFSKLHSLEYLDLSHNQLTTVPAGLPRTLAILHLGRNRIRQVEAARLHGARGLRYLLLQHNQLGSSGLPAGALRPLRGLHTLHLYGNGLDRVPPALPRRLRALVLPHNHVAALGARDLVATPGLTELNLAYNRLASARVHHRAFRRLRALRSLDLAGNQLTRLPMGLPTGLRTLQLQRNQLRMLEPEPLAGLDQLRELSLAHNRLRVGDIGPGTWHELQALQMLDLSHNELSFVPPDLPEALEELHLEGNRIGHVGPEAFLSTPRLRALFLRANRLHMTSIAAEAFLGLPNLRVVDTAGNPEQVLIRLPPTTPRGPRAGGP

SEQ ID NO: 987 - DNA, 1239 bp, Homo sapiens
  CDS (1)..(1236)
atgatgaacaaccagctccaggaactcccctacaatgagctgtcccgcctcagtggcctgcgaaccctcaacctccacaacaacctcatctcctccgaaggcctgcctgacgaggccttcgagtccctcacccagctgcagcacctctgcgtggctcacaacaagaacaatctcatctccaaggtgccccgaggagccctgagccgccagactcaactccgtgagctctacctccagcacaaccagctgacagacagtggcctggatgccaccaccttcagcaagctgcatagccttgaatacctggatctctcccacaaccagctgaccacagtgcccgccggcctgccccggaccctggctatcctgcacctgggccgcaaccgcatccggcaggtggaggcggctcggctgcacggggcgcgtggtctgcgctatttgttgctgcagcacaaccagctggggagctcagggctgcccgccggggctctgcggccgctgcggggcctgcacacgctgcacctctatggcaatgggctggaccgcgtgcctccagccctgccccgccgcctgcgtgccctggtgctgccccacaaccacgtggccgcgctgggtgcccgtgacctggtcgccacaccgggcctgacggagcttaacctggcctataaccgcctggccagcgcccgtgtgcaccaccgggccttccgccggttgcgtgccctgcgcagcctcgacctggcagggaatcagctaacccggctgcccatgggcctgcccactggcctgcgcaccctgcagctgcaacgcaaccagctgcggatgctcgagcccgagcctctggccggcctggaccaactgcgggagctcagcctggcgcacaaccggctccgggtcggcgacatcgggccaggcacctggcatgagctccaagccctccagatgctggacctcagccacaatgagctgtcctttgtgcccccggacctgcctgaggccctagaggagctgcacctcgagggcaaccgcatcggccacgtgggccccgaggccttcctcagcacaccccgcctgcgtgccctcttcctcagggccaacaggcttcacatgacgagcatcgcggctgaggccttcctggggctcccaaacctgcgtgtggtggacacggcagggaatccggagcaggtcctgatccggctgcctcccaccaccccacgtgggccacgggcagggggcccctga

SEQ ID NO: 988 - protein, 412 aa, Homo sapiens
MMNNQLQELPYNELSRLSGLRTLNLHNNLISSEGLPDEAFESLTQLQHLCVAHNKNNLISKVPRGALSRQTQLRELYLQHNQLTDSGLDATTFSKLHSLEYLDLSHNQLTTVPAGLPRTLAILHLGRNRIRQVEAARLHGARGLRYLLLQHNQLGSSGLPAGALRPLRGLHTLHLYGNGLDRVPPALPRRLRALVLPHNHVAALGARDLVATPGLTELNLAYNRLASARVHHRAFRRLRALRSLDLAGNQLTRLPMGLPTGLRTLQLQRNQLRMLEPEPLAGLDQLRELSLAHNRLRVGDIGPGTWHELQALQMLDLSHNELSFVPPDLPEALEELHLEGNRIGHVGPEAFLSTPRLRALFLRANRLHMTSIAAEAFLGLPNLRVVDTAGNPEQVLIRLPPTTPRGPRAGGP

SEQ ID NO: 989 - DNA, 1710 bp, Homo sapiens
  CDS (1)..(1455)
atgtggccgagcctgctgctgctcctgctgttgccggggcccccgcccgtcgccggcttggaagacgctgccttcccccacctgggggagagcttgcagcccctgccccgggcctgtcccctgcgctgctcctgcccccgagtcgacactgtggactgtgatggcttggaccttcgagtgttcccggacaacatcaccagagccgctcagcacctctccctgcagaacaaccagctccaggaactcccctacaatgagctgtcccgcctcagtggcctgcgaaccctcaacctccacaacaacctcatctcctccgaaggtctgcctgacgaggccttcgagtccctcacccagctgcagcacctctgcgtggctcacaacaagaacaatctcatctccaaggtgccccgaggagccctgagccgccagactcaactccgtgagctctacctccagcacaaccagctgacagacagtggcctggatgccaccaccttcagcaagctgcatagccttgaatacctggatctctcccacaaccagctgaccacagtgcccgccggcctgccccggaccctggctatcctgcacctgggccgcaaccgcatccggcaggtggaggcggctcggctgcacggggcgcgtggtctgcgctatttgttgctgcagcacaaccagctggggagctcagggctgcccgccggggctctgcggccgctgcggggcctgcacacgctgcacctctatggcaatgggctggaccgcgtgcctccagccctgccccgccgcctgcgtgccctggtgctgccccacaaccacgtggccgcgctgggtgcccgtgacctggtcgccacaccgggcctgacggagcttaacctggcctataaccgcctggccagcgcccgtgtgcaccaccgggccttccgccggttgcgtgccctgcgcagcctcgacctggcagggaatcagctaacccggctgcccatgggcctgcccactggcctgcgcaccctgcagctgcaacgcaaccagctgcggatgctcgagcccgagcctctggccggcctggaccaactgcgggagctcagcctggcgcacaaccggctccgggtcggcgacatcgggccaggcacctggcatgagctccaagccctccagatgctggacctcagccacaatgagctgtcctttgtgcccccggacctgcctgaggccctagaggagctgcacctcgagggcaaccgcatcggccacgtgggccccgaggccttcctcagcacaccccgcctgcgtgccctcttcctcagggccaacaggcttcacatgacgagcatcgcggctgaggccttcctggggctcccaaacctgcgtgtggtggacacggcagggaatccggagcaggtcctgatccggctgcctcccaccaccccacgtgggccacgggcagggggcccctgatcctagagaggcccagcagagcagctcagactcctgggactccgctgggccgtggactgaggagacaacgcccaccaggggcccttggtctggctctcctgggcctccagggctgggcctgctctgcctgccactggccgagacacagaggcacacagctggcatactccaggctcacagaccacgccggcctggcgggacacaccctaccccaaactcccaacacagatggaggcagcaacaataaagcca

SEQ ID NO: 990 - protein, 485 aa, Homo sapiens
MWPSLLLLLLLPGPPPVAGLEDAAFPHLGESLQPLPRACPLRCSCPRVDTVDCDGLDLRVFPDNITRAAQHLSLQNNQLQELPYNELSRLSGLRTLNLHNNLISSEGLPDEAFESLTQLQHLCVAHNKNNLISKVPRGALSRQTQLRELYLQHNQLTDSGLDATTFSKLHSLEYLDLSHNQLTTVPAGLPRTLAILHLGRNRIRQVEAARLHGARGLRYLLLQHNQLGSSGLPAGALRPLRGLHTLHLYGNGLDRVPPALPRRLRALVLPHNHVAALGARDLVATPGLTELNLAYNRLASARVHHRAFRRLRALRSLDLAGNQLTRLPMGLPTGLRTLQLQRNQLRMLEPEPLAGLDQLRELSLAHNRLRVGDIGPGTWHELQALQMLDLSHNELSFVPPDLPEALEELHLEGNRIGHVGPEAFLSTPRLRALFLRANRLHMTSIAAEAFLGLPNLRVVDTAGNPEQVLIRLPPTTPRGPRAGGP

SEQ ID NO: 991 - DNA, 1992 bp, Homo sapiens
  CDS (1)..(1737)
atggggaggcccacccagtggccgagcctgctgctgctcctgctgttgccggggcccccgcccgtcgccggcttggaagacgctgccttcccccacctgggggagagcttgcagcccctgccccgggcctgtcccctgcgctgctcctgcccccgagtcgacactgtggactgtgatggcttggaccttcgagtgttcccggacaacatcaccagagccgctcagcacctctccctgcagaacaaccagctccaggaactcccctacaatgagctgtcccgcctcagtggcctgcgaaccctcaacctccacaacaacctcatctcctccgaaggtctgcctgacgaggccttcgagtccctcacccagctgcagcacctctgcgtggctcacaacaagctctcagtggcccctcagtttctgccccggtccctccgtgtcgcggatctggctgccaaccaagtgatggagatcttccccctcacctttggggagaagccggcactcaggtccgtgtacctccacaacaaccagctgagcaacgctggcctgccccccgacgccttccgcggctccgaggccatcgccaccctcagcctctccaacaaccagctcagctacctgccgcccagcctgccgccctcactcgagcggctccacctgcagaacaatctcatctccaaggtgccccgaggagccctgagccgccagactcaactccgtgagctctacctccagcacaaccagctgacagacagtggcctggatgccaccaccttcagcaagctgcatagccttgaatacctggatctctcccacaaccagctgaccacagtgcccgccggcctgccccggaccctggctatcctgcacctgggccgcaaccgcatccggcaggtggaggcggctcggctgcacggggcgcgtggtctgcgctatttgttgctgcagcacaaccagctggggagctcagggctgcccgccggggctctgcggccgctgcggggcctgcacacgctgcacctctatggcaatgggctggaccgcgtgcctccagccctgccccgccgcctgcgtgccctggtgctgccccacaaccacgtggccgcgctgggtgcccgtgacctggtcgccacaccgggcctgacggagcttaacctggcctataaccgcctggccagcgcccgtgtgcaccaccgggccttccgccggttgcgtgccctgcgcagcctcgacctggcagggaatcagctaacccggctgcccatgggcctgcccactggcctgcgcaccctgcagctgcaacgcaaccagctgcggatgctcgagcccgagcctctggccggcctggaccaactgcgggagctcagcctggcgcacaaccggctccgggtcggcgacatcgggccaggcacctggcatgagctccaagccctccagatgctggacctcagccacaatgagctgtcctttgtgcccccggacctgcctgaggccctagaggagctgcacctcgagggcaaccgcatcggccacgtgggccccgaggccttcctcagcacaccccgcctgcgtgccctcttcctcagggccaacaggcttcacatgacgagcatcgcggctgaggccttcctggggctcccaaacctgcgtgtggtggacacggcagggaatccggagcaggtcctgatccggctgcctcccaccaccccacgtgggccacgggcagggggcccctgatcctagagaggcccagcagagcagctcagactcctgggactccgctgggccgtggactgaggagacaacgcccaccaggggcccttggtctggctctcctgggcctccagggctgggcctgctctgcctgccactggccgagacacagaggcacacagctggcatactccaggctcacagaccacgccggcctggcgggacacaccctaccccaaactcccaacacagatggaggcagcaacaataaagcca

SEQ ID NO: 992 - protein, 579 aa, Homo sapiens
MGRPTQWPSLLLLLLLPGPPPVAGLEDAAFPHLGESLQPLPRACPLRCSCPRVDTVDCDGLDLRVFPDNITRAAQHLSLQNNQLQELPYNELSRLSGLRTLNLHNNLISSEGLPDEAFESLTQLQHLCVAHNKLSVAPQFLPRSLRVADLAANQVMEIFPLTFGEKPALRSVYLHNNQLSNAGLPPDAFRGSEAIATLSLSNNQLSYLPPSLPPSLERLHLQNNLISKVPRGALSRQTQLRELYLQHNQLTDSGLDATTFSKLHSLEYLDLSHNQLTTVPAGLPRTLAILHLGRNRIRQVEAARLHGARGLRYLLLQHNQLGSSGLPAGALRPLRGLHTLHLYGNGLDRVPPALPRRLRALVLPHNHVAALGARDLVATPGLTELNLAYNRLASARVHHRAFRRLRALRSLDLAGNQLTRLPMGLPTGLRTLQLQRNQLRMLEPEPLAGLDQLRELSLAHNRLRVGDIGPGTWHELQALQMLDLSHNELSFVPPDLPEALEELHLEGNRIGHVGPEAFLSTPRLRALFLRANRLHMTSIAAEAFLGLPNLRVVDTAGNPEQVLIRLPPTTPRGPRAGGP

SEQ ID NO: 993 - DNA, 1278 bp, Homo sapiens; identical to SEQ ID NO: 973
  CDS (10)..(1272)

SEQ ID NO: 994 - protein, 421 aa, Homo sapiens
MGRPTQWPSLLLLLLLPGPPPVAGLEDAAFPHLGESLQPLPRACPLRCSCPRVDTVDCDGLDLRVFPDNITRAAQHLSLQNNQLQELPYNELSRLSGLRTLNLHNNLISSEGLPDEAFESLTQLQHLCVAHNKNNLISKVPRGALSRQTQLRELYLQHNQLTDSGLDATTFSKLHSLEYLDLSHNQLTTVPAGLPRTLAILHLGRNRIRQVEAARLHGARGLRYLLLQHNQLGSSGLPAGALRPLRGLHTLHLYGNGLDRVPPALPRRLRALVLPHNHVAALGARDLVATPGLTELNLAYNRLASARVHHRAFRRLRALRSLDLAGNQLTRLPMGLPTGLRTLQLQRNQLRMLEPEPLAGLDQLRELSLAHNRLRVGDIGPGTWHELQALQVRHRLVSHTVPRAPPSPCLPCHVPNILVSW

SEQ ID NO: 995 - DNA, 1744 bp, Homo sapiens; identical to SEQ ID NO: 981
  CDS (14)..(1744)

SEQ ID NO: 996 - protein, 577 aa, Homo sapiens
MWPSLLLLLLLPGPPPVAGLEDAAFPHLGESLQPLPRACPLRCSCPRVDTVDCDGLDLRVFPDNITRAAQHLSLQNNQLQELPYNELSRLSGLRTLNLHNNLISSEGLPDEAFESLTQLQHLCVAHNKLSVAPQFLPRSLRVADLAANQVMEIFPLTFGEKPALRSVYLHNNQLSNAGLPPDAFRGSEAIATLSLSNNQLSYLPPSLPPSLERLHLQNNLISKVPRGALSRQTQLRELYLQHNQLTDSGLDATTFSKLHSLEYLDLSHNQLTTVPAGLPRTLAILHLGRNRIRQVEAARLHGARGLRYLLLQHNQLGSSGLPAGALRPLRGLHTLHLYGNGLDRVPPALPRRLRALVLPHNHVAALGARDLVATPGLTELNLAYNRLASARVHHRAFRRLRALRSLDLAGNQLTRLPMGLPTGLRTLQLQRNQLRMLEPEPLAGLDQLRELSLAHNRLRVGDIGPGTWHELQALQMLDLSHNELSFVPPDLPEALEELHLEGNRIGHVGPEAFLSTPRLRALFLRANRLHMTSIAAEAFLGLPNLRVVDTAGNPEQVLIRLPPTTPRGPRAGGPKLG

SEQ ID NO: 997 - DNA, 2153 bp, Homo sapiens
  CDS (16)..(2136)
gatgctggcacttacatgtgtgtggcccagaacccggctggtacagccttgggcaaaatcaagttaaatgtccaagttcctccagtcattagccctcatctaaaggaatatgttattgctgtggacaagcccatcacgttatcctgtgaagcagatggcctccctccgcctgacattacatggcataaagatgggcgtgcaattgtggaatctatccgccagcgcgtcctcagctctggctctctgcaaatagcatttgtccagcctggtgatgctggccattacacgtgcatggcagccaatgtagcaggatcaagcagcacaagcaccaagctcaccgtccatgtaccacccaggatcagaagtacagaaggacactacacggtcaatgagaattcacaagccattcttccatgcgtagctgatggaatccccacaccagcaattaactggaaaaaagacaatgttcttttagctaacttgttaggaaaatacactgctgaaccatatggagaactcattttagaaaatgttgtgctggaggattctggcttctatacctgtgttgctaacaatgctgcaggtgaagatacacacactgtcagcctgactgtgcatgttctccccacttttactgaacttcctggagacgtgtcattaaataaaggagaacagctacgattaagctgtaaagctactggtattccattgcccaaattaacatggaccttcaataacaatattattccagcccactttgacagtgtgaatggacacagtgaacttgttattgaaagagtgtcaaaagaggattcaggtacttatgtgtgcaccgcagagaacagcgttggctttgtgaaggcaattggatttgtttatgtgaaagaacctccagtcttcaaaggtgattatccttctaactggattgaaccacttggtgggaatgcaatcctgaattgtgaggtgaaaggagaccccaccccaaccatccagtggaacagaaagggagtggatattgaaattagccacagaatccggcaactgggcaatggctccctggccatctatggcactgttaatgaagatgccggtgactatacatgtgtagctaccaatgaagctggggtggtggagcgcagcatgagtctgactctgcaaagtcctcctattatcactcttgagccagtggaaactgttattaatgctggtggcaaaatcatattgaattgtcaggcaactggagagcctcaaccaaccattacatggtcccgtcaagggcactctatttcctgggatgaccgggttaacgtgttgtccaacaactcattatatattgctgatgctcagaaagaagatacctctgaatttgaatgcgttgctcgaaacttaatgggttctgtccttgtcagagtgccagtcatagtccaggttcatggtggattttcccagtggtctgcatggagagcctgcagtgtcacctgtggaaaaggcatccaaaagaggagtcgtctgtgcaaccagccccttccagccaatggtgggaagccctgccaaggttcagatttggaaatgcgaaactgtcaaaataagccttgtccagtggatggtagctggtcggaatggagtctttgggaagaatgcacaaggagctgtggacgcggcaaccaaaccaggaccaggacttgcaataatccatcagttcagcatggtgggcggccatgtgaagggaatgctgtggaaataattatgtgcaacattaggccttgcccagttcatggagcatggagcgcttggcagccttggggaacatgcagcgaaagttgtgggaaaggtactcagacaagagcaagactttgtaataacccaccaccagcgtttggtgggtcctactgtgatggagcagaaacacagatgcaagtttgcaatgaaagaaattgtccaattcatggcaagtgggcgacttgggccagttggagtgcctgttctgtgtcatgtggaggaggtgccagacagagaacaaggggctgctccgaccctgtgccccagtatggaggaaggaaatgcgaagggagtgatgtccagagtgatttttgcaacagtgacccttgcccaagtgagtgttggaaatacccatggtaactggagtccttgga

SEQ ID NO: 998 - protein, 707 aa, Homo sapiens
MCVAQNPAGTALGKIKLNVQVPPVISPHLKEYVIAVDKPITLSCEADGLPPPDITWHKDGRAIVESIRQRVLSSGSLQIAFVQPGDAGHYTCMAANVAGSSSTSTKLTVHVPPRIRSTEGHYTVNENSQAILPCVADGIPTPAINWKKDNVLLANLLGKYTAEPYGELILENVVLEDSGFYTCVANNAAGEDTHTVSLTVHVLPTFTELPGDVSLNKGEQLRLSCKATGIPLPKLTWTFNNNIIPAHFDSVNGHSELVIERVSKEDSGTYVCTAENSVGFVKAIGFVYVKEPPVFKGDYPSNWIEPLGGNAILNCEVKGDPTPTIQWNRKGVDIEISHRIRQLGNGSLAIYGTVNEDAGDYTCVATNEAGVVERSMSLTLQSPPIITLEPVETVINAGGKIILNCQATGEPQPTITWSRQGHSISWDDRVNVLSNNSLYIADAQKEDTSEFECVARNLMGSVLVRVPVIVQVHGGFSQWSAWRACSVTCGKGIQKRSRLCNQPLPANGGKPCQGSDLEMRNCQNKPCPVDGSWSEWSLWEECTRSCGRGNQTRTRTCNNPSVQHGGRPCEGNAVEIIMCNIRPCPVHGAWSAWQPWGTCSESCGKGTQTRARLCNNPPPAFGGSYCDGAETQMQVCNERNCPIHGKWATWASWSACSVSCGGGARQRTRGCSDPVPQYGGRKCEGSDVQSDFCNSDPCPSECWKYPW

SEQ ID NO: 999 - DNA, 2136 bp, Homo sapiens
  CDS (1)..(2136)
ggatccaccatgtgtgtggcccagaacccggctggtacagccttgggcaaaatcaagttaaatgtccaagttcctccagtcattagccctcatctaaaggaatatgttattgctgtggacaagcccatcacgttatcctgtgaagcagatggcctccctccgcctgacattacatggcataaagatgggcgtgcaattgtggaatctatccgccagcgcgtcctcagctctggctctctgcaaatagcatttgtccagcctggtgatgctggccattacacgtgcatggcagccaatgtagcaggatcaagcagcacaagcaccaagctcaccgtccatgtaccacccaggatcagaagtacagaaggacactacacggtcaatgagaattcacaagccattcttccatgcgtagctgatggaatccccacaccagcaattaactggaaaaaagacaatgttcttttagctaacttgttaggaaaatacactgctgaaccatatggagaactcattttagaaaatgttgtgctggaggattctggcttctatacctgtgttgctaacaatgctgcaggtgaagatacacacactgtcagcctgactgtgcatgttctccccacttttactgaacttcctggagacgtgtcattaaataaaggagaacagctacgattaagctgtaaagctactggtattccattgcccaaattaacatggaccttcaataacaatattattccagcccactttgacagtgtgaatggacacagtgaacttgttattgaaagagtgtcaaaagaggattcaggtacttatgtgtgcaccgcagagaacagcgttggctttgtgaaggcaattggatttgtttatgtgaaagaacctccagtcttcaaaggtgattatccttctaactggattgaaccacttggtgggaatgcaatcctgaattgtgaggtgaaaggagaccccaccccaaccatccagtggaacagaaagggagtggatattgaaattagccacagaatccggcaactgggcaatggctccctggccatctatggcactgttaatgaagatgccggtgactatacatgtgtagctaccaatgaagctggggtggtggagcgcagcatgagtctgactctgcgaagtcctcctattatcactcttgagccagtggaaactgttattaatgctggtggcaaaatcatattgaattgtcaggcaactggagagcctcaaccaactattacatggtcccgtcaagggcactctatttcctgggatgaccgggttaacgtgttgtccaacaactcattatatattgctgatgctcagaaagaagatacctctgaatttgaatgtgttgctcgaaacttaatgggttctgtccttgtcagagtgccagtcatagtccaggttcatggtggattttcccagtggtctgcatggagagcctgcagtgtcacctgtggaaaaggcatccaaaagaggagtcgtctgtgcaaccagccccttccagccaatggtgggaagccctgccaaggttcagatttggaaatgcgaaactgtcaaaataagccttgtccagtggatggtagctggtcggaatggagtctttgggaagaatgcacaaggagctgtggacgcggcaaccaaaccaggaccaggacttgcaataatccatcagttcagcatggtgggcggccatgtgaagggaatgctgtggaaataattatgtgcaacattaggccttgcccagttcatggagcatggagcgcttggcagctttggggaacatgcagcgaaagttgtgggaaaggtactcagacaagagcaagactttgtaataacccaccaccagcgtttggtgggtcctactgtgatggagcagaaacacagatgcaagtttgcaatgaaagaaattgtccaattcatggcaagtgggcgacttgggccagttggagtgcctgttctgtgtcatgtggaggaggtgccagacagagaacaaggggctgctccgaccctgtgccccagtatggaggaaggaaatgcgaagggagtgatgtccagagtgatttttgcaacagtgacccttgcccaagtgagtgttggaaatacccatggctcgag

SEQ ID NO: 1000 - protein, 712 aa, Homo sapiens
GSTMCVAQNPAGTALGKIKLNVQVPPVISPHLKEYVIAVDKPITLSCEADGLPPPDITWHKDGRAIVESIRQRVLSSGSLQIAFVQPGDAGHYTCMAANVAGSSSTSTKLTVHVPPRIRSTEGHYTVNENSQAILPCVADGIPTPAINWKKDNVLLANLLGKYTAEPYGELILENVVLEDSGFYTCVANNAAGEDTHTVSLTVHVLPTFTELPGDVSLNKGEQLRLSCKATGIPLPKLTWTFNNNIIPAHFDSVNGHSELVIERVSKEDSGTYVCTAENSVGFVKAIGFVYVKEPPVFKGDYPSNWIEPLGGNAILNCEVKGDPTPTIQWNRKGVDIEISHRIRQLGNGSLAIYGTVNEDAGDYTCVATNEAGVVERSMSLTLRSPPIITLEPVETVINAGGKIILNCQATGEPQPTITWSRQGHSISWDDRVNVLSNNSLYIADAQKEDTSEFECVARNLMGSVLVRVPVIVQVHGGFSQWSAWRACSVTCGKGIQKRSRLCNQPLPANGGKPCQGSDLEMRNCQNKPCPVDGSWSEWSLWEECTRSCGRGNQTRTRTCNNPSVQHGGRPCEGNAVEIIMCNIRPCPVHGAWSAWQLWGTCSESCGKGTQTRARLCNNPPPAFGGSYCDGAETQMQVCNERNCPIHGKWATWASWSACSVSCGGGARQRTRGCSDPVPQYGGRKCEGSDVQSDFCNSDPCPSECWKYPWLE

SEQ ID NO: 1001 - DNA, 15660 bp, Homo sapiens
  CDS (1649)..(15133)
gattagtggcataaactgtaggtcagctggtggaggcaagccagcaaggggcttcatggtaaccagtggaaacacaaaaatataaggggcttctgaggcgatcgggcagtgtcagtcttcagccgctaagccgagaagatctgggaaggagtcagtcagagagccttgggccagagttccaggggctctgggagtggctgccagaaaataccagaaaatgaaaggaattgaaattaagagaagggagagattgaagtgtggcgccaagattgaaaggagaaagaggttgaaggatagggaggttggagaagagagtaaaaagaggccacttactggatttgaaattgaaccacccaaagtcactgtgatgcccaagaatcagtctttcacaggagggtctgaggtctccatcatgtgttctgcaacaggttatcccaaaccaaagattgcctggaccgttaacgatatgtttatcgtgggttcacacaggtataggatgacctcagatggtaccttatttatcaaaaatgcagctcccaaagatgcagggatctatggttgcctagcaaaagcccctaagttgatggtagttcagagtgagctcttggttgcccttggggatataaccgttatggaatgcaaaacctctggtattcctccacctcaagttaaatggttcaaaggagatcttgagttgaggccctcaacattcctcattattgaccctctcttgggacttttgaagattcaagaaacacaagatctggatgctggcgattatacctgtgtagccatcaatgaggctggaagagcaactggcaagataactctggatgttggctcacctccagttttcatacaagaacctgctgatgtgtctatggaaattggctcaaatgtgacattaccttgttatgttcagggttatccagaaccaacaatcaaatggcgaagattagacaacatgccaattttctcaagacctttttcagttagttccatcagccaactaagaacaggagctctctttattttaaacttatgggcaagtgataaaggaacctatatttgtgaagctgaaaaccagtttggaaagatccagtcagagacaacagtaacagtgaccggacttgttgctccacttattggaatcagcccttcagtggccaatgttattgaaggacagcagcttactttgccctgtactctgttagctggaaatcccattccagaacgtcggtggattaagaattcagctatgttgctccaaaatccttacatcactgtgcgcagtgatgggagcctccatattgaaagagttcagcttcaggatggtggtgaatatacttgtgtggccagtaacgttgctgggaccaataacaaaactacctctgtggttgtgcatgttctgccaaccattcagcatgggcagcagatactcagtacaattgaaggcattccagtaactttaccatgcaaagcaagtggaaatcccaaaccgtctgtcatctggtccaaggtaaatgatacatctagttatatttcctgaagagcagagtgtgaagttcacctgcaagttatccctagtcttgagcaggaggctcaggagtggggcatggaaagaagataagttaataaaggatttcctatgtggctggacagatgtgctaggaaccctccaagaaaccatatagatgcacctcagaaggctccctcggcttttcgccgtgttttgcagaaaggagagctgatttcaaccagcagtgctaagttttcagcaggagctgatggtagtctgtatgtggtatcacctggaggagaggagagtggggagtatgtctgcactgccaccaatacagccggctacgccaaaaggaaagtgcagctaacagtctatgtaaggcccagagtgtttggagatcaacgaggactgtcccaggataagcctgttgagatctccgtccttgcaggggaagaggtaacacttccatgtgaagtgaagagcttacctccacccataattacttgggccaaagaaacccagctcatctcaccgttctctccaagacacacattcctcccttctggttcaatgaagatcactgaaacccgcacttcagatagtgggatgtatctttgtgttgccacaaatattgctgggaatgtgactcaggctgtcaaattaaatgtccatgttcctccaaagatacagcgtggacctaaacatctcaaagtccaagttggtcaaagagtggatattccatgtaatgctcaagggactcctcttcctgtaatcacctggtccaaaggtggaagcactatgctggttgatggagagcaccatgttagcaatccagacggaactttaagcatcgaccaagccacgccctcagatgctggcatatatacatgtgttgctactaacatagcaggcactgatgaaacagagataacgctacatgtccaagaaccacccacagtggaagatctagaacctccatataacactactttccaagaaagagtggccaatcaacgcattgaatttccatgtcctgcaaaaggtacccctaaaccaaccatcaaatggttacacaatggtagagagttgacaggcagagagcctggcatttctatcttggaagatggcacattgctggttattgcttctgttacaccctatgacaatggggagtacatctgtgtggcagtcaatgaagctggaaccacagaaagaaaatataacctcaaagtccatgttcctccagtaattaaagataaagaacaagttacaaatgtgtcggtgttgttaaatcagctgaccaatctcttctgtgaagtggaaggcactccatctcccatcattatgtggtataaagataatgtccaggtgactgaaagcagcactattcagactgtgaacaatgggaagatactgaagctcttcagagccactccagaggatgcaggaagatattcctgcaaagcaattaatattgcaggcacttctcagaagtactttaacattgatgtgctaggtaccaacttcccaaatgaagtctcagttgtcctcaaccgtgacgtcgcccttgaatgccaggtcaaaggcactccctttcctgatattcattggttcaaagatggcaatattaaaggaggaaatgtcaccacagacatatcagtattgatcaacagccttattaaactggaatgtgaaacacggggacttccaatgcctgccattacttggtataaggacgggcagccaatcatgtccagctcacaagcactttatattgataaaggacaatatcttcatattcctcgagcacaggtctctgattcagcaacatatacgtgtcacgtagccaatgttgctggaactgctgaaaaatcattccatgtggatgtctatgttcctccaatgattgaaggcaacttggccacgcctttgaataagcaagtagttattgctcattctctgacactggagtgcaaagctgctggaaacccttctcccattctcacctggttgaaagatggtgtacctgtgaaagctaatgacaatatccgcatagaagctggtgggaagaaactcgaaatcatgagtgcccaagaaattgatcgaggacagtacatatgcgtggctaccagtgtggcaggagaaaaggaaatcaaatatgaagttgatgtcttggtgccaccagctatagaaggaggagatgaaacatcttacttcattgtgatggttaataacttactggagctagattgtcatgtgacaggctctcccccaccaactatcatgtggctgaaggatggccagttaattgatgaaagggatggattcaagattttattaaatggacgcaaactggttattgctcaggctcaagtgtcaaacacaggcctttatcggtgcatggcagcaaatactgctggagaccacaagaaggaatttgaagtgactgttcatgttcctccaacaatcaagtcctcaggcctttctgagagagttgtggtaaaatacaagcctgtcgccttgcagtgcatagccaatgggattccaaatccttccattacatggttaaaagatgaccagcctgtgaacactgcccaaggaaaccttaaaatacagtcttctggtcgagttctacaaattgccaaaaccctgttggaagatgctggcagatacacatgtgtggctaccaacgcagctggagaaacacaacagcacattcaactgcatgttcatgaaccacctagtctggaagatgctggaaaaatgctgaatgagactgtgttggtgagcaaccctgtacagctggagtgtaaggcagctggaaatcctgtgcctgttattacatggtacaaagataatcgtctactctcaggttccaccagcatgactttcttgaacagaggacagatcattgatattgaaagtgcccagatctcagatgctggcatatataaatgcgtggccatcaactcagctggagctacagagttattttacagtctgcaagttcatgtggccccatcaatttctggcagcaataacatggtggcagtggtggttaataacccggtgaggttagaatgtgaagccagaggtattcctgccccaagtctgacctggttgaaagatgggagtcctgtttctagtttttctaatggattacaggttctctctggtggtcgaatcctagcattgaccagtgcacaaatcagcgacacaggaaggtacacctgcgtggcagtgaatgctgctggagaaaagcaaagggacattgacctccgagtatatgttccgccaaatattatgggagaagaacagaatgtctctgtcctcattagccaagctgtggaattactatgtcaaagtgatgctattcccccacctactcttacttggttaaaagacggccaccccttgctgaagaaaccaggcctcagtatatctgaaaatagaagtgtgttaaagattgaagatgctcaggttcaagacactggtcgttacacttgtgaagcaacaaatgttgctggaaaaactgaaaaaaactacaatgtcaacatttgggtccccccaaatattggtggttctgatgaacttactcaacttacagtcattgaagggaatctcattagtctgttgtgtgaatcaagtggtattccacccccaaatctcatctggaagaagaaaggctctccagtgctgactgattccatggggcgagttagaattttatctgggggcaggcaattacaaatttcaattgctgaaaagtctgatgcagcactctattcatgtgtggcgtcgaatgttgctgggactgcaaagaaagaatacaatctgcaagtttacattagaccaaccataaccaacagtggcagccaccctactgaaattattgtgacccgagggaagagtatctccttggagtgtgaggtgcagggtattccaccaccaacagtgacctggatgaaagatggccaccccttgatcaaggcaaagggagtagaaatactggatgaaggtcacatccttcagctgaagaacattcatgtatctgacacaggccgttatgtgtgtgttgctgtgaatgtagcaggaatgactgacaaaaaatatgacttaagtgtccatggaggcaggatgctacggctgatgcagaccacaatggaagatgctggccaatatacttgcgttgtaaggaatgcagctggtgaagaaagaaaaatctttgggctttcagtattagtaccacctcatattgtgggtgaaaatacattggaagatgtgaaggtaaaagagaaacagagtgttacgctgacttgtgaagtgacagggaatccagtgccagaaattacatggcacaaagatgggcagcccctccaagaagatgaagcccatcacattatatctggtggccgttttcttcaaattaccaatgtccaggtgccacacactggaagatatacatgtttggcttccagtccagctggccacaagagcaggagcttcagtcttaatgtatttgtatctcctacaattgctggtgtaggtagtgatggcaaccctgaagatgtcactgtcatccttaacagccctacatctttggtctgtgaagcttattcatatcctccagctaccatcacctggtttaaggatggcactcctttagaatctaaccgaaatattcgtattcttccaggaggcagaactctgcagatcctcaatgcacaggaggacaatgctggaagatactcttgtgtagccacgaatgaggctggagaaatgataaagcactatgaagtgaaggtgtacacacttaatgctaacattgttataattgaatcacagccccttaaatccgatgatcatgttaatattgctgcgaatggacacacacttcaaataaaggaggctcaaatatcagacaccggacgatatacttgtgtagcatctaacattgcaggtgaagatgagttggattttgatgtgaatattcaagttcctccaagttttcagaaactctgggaaataggaaacatgctagatactggcaggaatggtgaagccaaagatgtgatcatcaacaatcccatttctctttactgtgagacaaatgctgctccccctcctacactgacatggtacaaagatggccaccctctgacctcaagtgataaagtattgattttgccaggagggcgagtgttgcagattcctcgggctaaagtagaagatgctgggagatacacatgtgtggctgtgaatgaggctggagaagattcccttcaatatgatgtccgtgtactcgtgccgccaattatcaagggagcaaatagtgatctccctgaagaggtcaccgtgctggtgaacaagagtgcactgatagagtgtttatccagtggcagcccagcaccaaggaattcctggcagaaagatggacagcccttgctagaagatgaccatcataaatttctatctaatggacgaattctgcagattctgaatactcaaataacagatatcggcaggtatgtgtgtgttgctgagaacacagctgggagtgccaaaaaatattttaacctcaatgttcatgttcctccaagtgtcattggtcctaaatctgaaaatcttaccgtcgtggtgaacaatttcatctctttgacctgtgaggtctctggttttccacctcctgacctcagctggctcaagaatgaacagcccatcaaactgaacacaaatactctcattgtgcctggtggtcgaactctacagattattcgggccaaggtatcagatggtggtgaatacacttgtatagctatcaatcaagctggcgaaagcaagaaaaagttttccctgactgtttatgtgcccccaagcattaaagaccatgacagtgaatctctttctgtagttaatgtaagagagggaacttctgtgtctttggagtgtgagtcgaacgctgtgccacctccagtcatcacttggtataagaatgggcggatgataacagagtctactcatgtggagattttagctgatggacaaatgctacacattaagaaagctgaggtatctgacacaggccagtatgtatgtagagctataaatgtagcaggacgggatgataaaaatttccacctcaatgtatatgtgccacccagtattgaaggacctgaaagagaagtgattgtggagacgatcagcaatcctgtgacattaacatgtgatgccactgggatcccacctcccacgatagcatggttaaagaaccacaagcgcatagaaaattctgactcactggaagttcgtattttgtctggaggtagcaaactccagattgcccggtctcagcattcagatagtggaaactatacatgtattgcttcaaatatggagggaaaagcccagaaatattactttctttcaattcaagttcctccaagtgttgctggtgctgaaattccaagtgatgtcagtgtccttctaggagaaaatgttgagctggtctgcaatgcaaatggcattcctactccacttattcaatggcttaaagatggaaagcccatagctagtggtgaaacagaaagaatccgagtgagtgcaaatggcagcacattaaacatttatggagctcttacatctgacacggggaaatacacatgtgttgctactaatcccgctggagaagaagaccgaatttttaacttgaatgtctatgttacacctacaattaggggtaataaagatgaagcagagaaactaatgactttagtggatacttcaataaatattgaatgcagagccacagggacgcctccaccacagataaactggctgaagaatggacttcctctgcctctctcctcccatatccggttactggcagcaggacaagttatcaggattgtgagagctcaggtgtctgatgtcgctgtgtatacttgtgtggcctccaacagagctggggtggataataagcattacaatcttcaagtgtttgcaccaccaaatatggacaattcaatggggacagaggaaatcacagttctcaaaggtagttccacctctatggcatgcattactgatggaaccccagctcccagtatggcctggcttagagatggccagcctctggggcttgatgcccatctgacagtcagcacccatggaatggtcctgcagctcctcaaagcagagactgaagattcgggaaagtacacctgcattgcctcaaatgaagctggagaagtcagcaagcactttatcctcaaggtcctagaaccacctcacattaatggatctgaagaacatgaagagatatcagtaattgttaataacccacttgaacttacctgcattgcttctggaatcccagcccctaaaatgacctggatgaaagatggccggccccttccacagacggatcaagtgcaaactctaggaggaggagaggttcttcgaatttctactgctcaggtggaggatacaggaagatatacatgtctggcatccagtcctgcaggagatgatgataaggaatatctagtgagagtgcatgtacctcctaatattgctggaactgatgagccccgggatatcactgtgttacggaacagacaagtgacattggaatgcaagtcagatgcagtgcccccacctgtaattacttggctcagaaatggagaacggttacaggcaacacctcgagtgcgaatcctatctggagggagatacttgcaaatcaacaatgctgacctaggtgatacagccaattatacctgtgttgccagcaacattgcaggaaagactacaagagaatttattctcactgtaaatgttcctccaaacataaaggggggcccccagagccttgtaattcttttaaataagtcaactgtattggaatgcatcgctgaaggtgtcccaactccaaggataacatggagaaaggatggagctgttctagctgggaatcatgcaagatattccatcttggaaaatggattccttcatattcaatcagcacatgtcactgacactggacggtatttgtgtatggccaccaatgctgctggaacagatcgcaggcgaatagatttacaggtccatgttcctccatctattgctccgggtcctaccaacatgactgtaatagtaaatgttcaaactactctggcttgtgaggctactgggataccaaaaccatcaatcaattggagaaaaaatgggcatcttcttaatgtggatcaaaatcagaactcatacaggctcctttcttcaggttcactagtaattatttccccttctgtggatgacactgcaacctatgaatgtactgtgacaaacggtgctggagatgataaaagaactgtggatctcactgtccaagttccaccttccatagctgatgagcctacagatttcctagtaaccaaacatgccccagcagtaattacctgcactgcttcgggagttccatttccctcaattcactggaccaaaaatggtataagactgcttcccaggggagatggctatagaattctgtcctcaggagcaattgaaatacttgccacccaattaaaccatgctggaagatacacttgtgtcgctaggaatgcggctggctctgcacatcgacacgtgacccttcatgttcatgagcctccagtcattcagccccaaccaagtgaactacacgtcattctgaacaatcctattttattaccatgtgaagcaacagggacacccagtcctttcattacttggcaaaaagaaggcatcaatgttaacacttcaggcagaaaccatgcagttcttcctagtggcggcttacagatctccagagctgtccgagaggatgctggcacttacatgtgtgtggcccagaacccggctggtacagccttgggcaaaatcaagttaaatgtccaagttcctccagtcattagccctcatctaaaggaatatgttattgctgtggacaagcccatcacgttatcctgtgaagcagatggcctccctccgcctgacattacatggcataaagatgggcgtgcaattgtggaatctatccgccagcgcgtcctcagctctggctctctgcaaataacatttgtccagcctggtgatgctggccattacacgtgcatggcagccaatgtagcaggatcaagcagcacaagcaccaagctcaccgtccatgtaccacccaggatcagaagtacagaaggacactacacggtcaatgagaattcacaagccattcttccatgcgtagctgatggaatccccacaccagcaattaactggaaaaaagacaatgttcttttagctaacttgttaggaaaatacactgctgaaccatatggagaactcattttagaaaatgttgtgctggaggattctggcttctatacctgtgttgctaacaatgctgcaggtgaagatacacacactgtcagcctgactgtgcatgttctccccacttttactgaacttcctggagacgtgtcattaaataaaggagaacagctacgattaagctgtaaagctactggtattccattgcccaaattaacatggaccttcaataacaatattattccagcccactttgacagtgtgaatggacacagtgaacttgttattgaaagagtgtcaaaagaggattcaggtacttatgtgtgcaccgcagagaacagcgttggctttgtgaaggcaattggatttgtgtatgtgaaagaacctccagtcttcaaaggtgattatccttctcactggattgaaccacttggtgggaatgcaatcctgaattgtgaggtgaaaggagaccccaccccaaccatccagtggaacagaaagggagtggatattgaaattagccacagaatccggcaactgggcaatggctccctggccatctatggcactgttaatgaagatgccggtgactatacatgtgtagctaccaatgaagctggggtggtggagcgcagcatgagtctgactctgcaaagtcctcctattatcactcttgagccagtggaaactgttattaatgctggtggcaaaatcatattgaattgtcaggcaactggagagcctcaaccaaccattacatggtcccgtcaagggcactctatttcctgggatgaccgggttaacgtgttgtccaacaactcattatatattgctgatgctcagaaagaagatacctctgaatttgaatgtgttgctcgaaacttaatgggttctgtccttgtcagagtgccagtcatagtccaggttcatggtggattttcccagtggtctgcatggagagcctgcagtgtcacctgtggaaaaggcatccaaaagaggagtcgtctgtgcaaccagccccttccagccaatggtgggaagccctgccaaggttcagatttggaaatgcgaaactgtcaaaataagccttgtccagtggatggtagctggtcggaatggagtctttgggaagaatgcacaaggagctgtggacgcggcaaccaaaccaggaccaggacttgcaataatccatcagttcagcatggtgggcggccatgtgaagggaatgctgtggaaataattatgtgcaacattaggccttgcccagttcatggagcatggagcgcttggcagccttggggaacatgcagcgaaagttgtgggaaaggtactcagacaagagcaagactttgtaataacccaccaccagcgtttggtgggtcctactgtgatggagcagaaacacagatgcaagtttgcaatgaaagaaattgtccagttcatggcaagtgggcgacttgggccagttggagtgcctgttctgtgtcatgtggaggaggtgccagacagagaacaaggggctgctccgaccctgtgccccagtatggaggaaggaaatgcgaagggagtgatgtccagagtgatttttgcaacagtgacccttgcccaacccatggtaactggagtccttggagtggctggggaacatgcagccggacgtgtaacggagggcagatgcggcggtaccgcacatgtgataaccctcctccctccaatgggggaagagcttgtgggggaccagactcccagatccagaggtgcaacactgacatgtgtcctgtggatggaagttggggaagctggcatagttggagccagtgctctgcctcctgtggaggaggtgaaaagactcggaagcggctgtgcgaccatcctgtgccagttaaaggtggccgtccctgtcccggagacactactcaggtgaccaggtgcaatgtacaagcatgtccaggtgggccccagcgagccagaggaagtgttattggaaatattaatgatgttgaatttggaattgctttccttaatgccacaataactgatagccctaactctgatactagaataatacgtgccaaaattaccaatgtacctcgtagtcttggttcagcaatgagaaagatagtttctattctaaatcccatttattggacaacagcaaaggaaataggagaagcagtcaatggctttaccctcaccaatgcagtcttcaaaagagaaactcaagtggaatttgcaactggagaaatcttgcagatgagtcatattgcccggggcttggattccgatggttctttgctgctagatatcgttgtgagtggctatgtcctacagcttcagtcacctgctgaagtcactgtaaaggattacacagaggactacattcaaacaggtcctgggcagctgtacgcctactcaacccggctgttcaccattgatggcatcagcatcccatacacatggaaccacaccgttttctatgatcaggcacagggaagaatgcctttcttggttgaaacacttcatgcatcctctgtggaatctgactataaccagatagaagagacactgggttttaaaattcatgcttcaatatccaaaggagatcgcagtaatcagtgcccctccgggtttaccttagactcagttggacctttttgtgctgatgaggatgaatgtgcagcagggaatccctgctcccatagctgccacaatgccatggggacttactactgctcctgccctaaaggcctcaccatagctgcagatggaagaacttgtcaagatattgatgagtgtgctttgggtaggcatacctgccacgctggtcaggactgtgacaatacgattggatcttatcgctgtgtggtccgttgtggaagtggctttcgaagaacctctgatgggctgagttgtcaagatattaatgaatgtcaagaatccagcccctgtcaccagcgctgtttcaatgccataggaagtttccattgtggatgtgaacctgggtatcagctcaaaggcagaaaatgcatggatgtgaacgagtgtagacaaaatgtatgcagaccagatcagcactgtaagaacacccgtggtggctataagtgcattgatctttgtccaaatggaatgaccaaggcagaaaatggaacctgtattgatattgatgaatgtaaagatgggacccatcagtgcagatataaccagatatgtgagaatacaagaggcagctatcgttgtgtatgcccaagaggttatcggtctcaaggagttggaagaccctgcatggacattaatgaatgtgaacaagtgcctaaaccttgtgcacatcagtgctccaacacccccggcagcttcaagtgtatctgtccaccaggacaacatttattaggggacgggaaatcttgcgctggattggagaggctgccaaattatggcactcaatacagtagctataaccttgcacggttctcccctgtgagaaacaactatcaacctcaacagcattacagacagtactcacatctctacagctcctactcagagtatagaaacagcagaacatctctctccaggactagaaggactattaggaaaacttgccctgaaggctctgaggcaagccatgacacatgtgtagatattgatgaatgtgaaaatacagatgcctgccagcatgagtgtaagaatacctttggaagttatcagtgcatctgcccacctggctatcaactcacacacaatggaaagacatgccaagatatcgatgaatgtctggagcagaatgtgcactgtggacccaatcgcatgtgcttcaacatgagaggaagctaccagtgcatcgatacaccctgtccacccaactaccaacgggatcctgtttcagggttctgcctcaagaactgtccacccaatgatttggaatgtgccttgagcccatatgccttggaatacaaactcgtctccctcccatttggaatagccaccaatcaagatttaatccggctggttgcatacacacaggatggagtgatgcatcccaggacaactttcctcatggtagatgaggaacagactgttccttttgccttgagggatgaaaacctgaaaggagtggtgtatacaacacgaccactacgagaagcagagacctaccgcatgagggtccgagcctcatcctacagtgccaatgggaccattgaatatcagaccacattcatagtttatatagctgtgtccgcctatccatactaaggaactctccaaagcctattccacatatttaaaccgcattaatcatggcaatcaagcccccttccagattactgtctcttgaacagttgcaatcttggcagcttgaaaatggtgctacactctgttttgtgtgccttccttggtacttctgaggtattttcatgatcccaccatggtcatatcttgaagtatggtctagaaaagtcccttattattttatttattacactggagcagttacttcccaaagattattctgaacatctaacaggacatatcagtgatggtttacagtagtgtagtacctaagatcattttcctgaaagccaaaccaaacaacgaaaaacaagaacaactaattcagaatcaaatagagtttttgagcatttgactatttttagaatcataaaattagttactaagtattttgatcaaagcttataaaataacttacggagatttttgtaagtattgatacattataataggacttgcctattttcatttttaagaagaaaaacccg

SEQ ID NO: 1002 - protein, 4495 aa, Homo sapiens
MWLDRCARNPPRNHIDAPQKAPSAFRRVLQKGELISTSSAKFSAGADGSLYVVSPGGEESGEYVCTATNTAGYAKRKVQLTVYVRPRVFGDQRGLSQDKPVEISVLAGEEVTLPCEVKSLPPPIITWAKETQLISPFSPRHTFLPSGSMKITETRTSDSGMYLCVATNIAGNVTQAVKLNVHVPPKIQRGPKHLKVQVGQRVDIPCNAQGTPLPVITWSKGGSTMLVDGEHHVSNPDGTLSIDQATPSDAGIYTCVATNIAGTDETEITLHVQEPPTVEDLEPPYNTTFQERVANQRIEFPCPAKGTPKPTIKWLHNGRELTGREPGISILEDGTLLVIASVTPYDNGEYICVAVNEAGTTERKYNLKVHVPPVIKDKEQVTNVSVLLNQLTNLFCEVEGTPSPIIMWYKDNVQVTESSTIQTVNNGKILKLFRATPEDAGRYSCKAINIAGTSQKYFNIDVLGTNFPNEVSVVLNRDVALECQVKGTPFPDIHWFKDGNIKGGNVTTDISVLINSLIKLECETRGLPMPAITWYKDGQPIMSSSQALYIDKGQYLHIPRAQVSDSATYTCHVANVAGTAEKSFHVDVYVPPMIEGNLATPLNKQVVIAHSLTLECKAAGNPSPILTWLKDGVPVKANDNIRIEAGGKKLEIMSAQEIDRGQYICVATSVAGEKEIKYEVDVLVPPAIEGGDETSYFIVMVNNLLELDCHVTGSPPPTIMWLKDGQLIDERDGFKILLNGRKLVIAQAQVSNTGLYRCMAANTAGDHKKEFEVTVHVPPTIKSSGLSERVVVKYKPVALQCIANGIPNPSITWLKDDQPVNTAQGNLKIQSSGRVLQIAKTLLEDAGRYTCVATNAAGETQQHIQLHVHEPPSLEDAGKMLNETVLVSNPVQLECKAAGNPVPVITWYKDNRLLSGSTSMTFLNRGQIIDIESAQISDAGIYKCVAINSAGATELFYSLQVHVAPSISGSNNMVAVVVNNPVRLECEARGIPAPSLTWLKDGSPVSSFSNGLQVLSGGRILALTSAQISDTGRYTCVAVNAAGEKQRDIDLRVYVPPNIMGEEQNVSVLISQAVELLCQSDAIPPPTLTWLKDGHPLLKKPGLSISENRSVLKIEDAQVQDTGRYTCEATNVAGKTEKNYNVNIWVPPNIGGSDELTQLTVIEGNLISLLCESSGIPPPNLIWKKKGSPVLTDSMGRVRILSGGRQLQISIAEKSDAALYSCVASNVAGTAKKEYNLQVYIRPTITNSGSHPTEIIVTRGKSISLECEVQGIPPPTVTWMKDGHPLIKAKGVEILDEGHILQLKNIHVSDTGRYVCVAVNVAGMTDKKYDLSVHGGRMLRLMQTTMEDAGQYTCVVRNAAGEERKIFGLSVLVPPHIVGENTLEDVKVKEKQSVTLTCEVTGNPVPEITWHKDGQPLQEDEAHHIISGGRFLQITNVQVPHTGRYTCLASSPAGHKSRSFSLNVFVSPTIAGVGSDGNPEDVTVILNSPTSLVCEAYSYPPATITWFKDGTPLESNRNIRILPGGRTLQILNAQEDNAGRYSCVATNEAGEMIKHYEVKVYTLNANIVIIESQPLKSDDHVNIAANGHTLQIKEAQISDTGRYTCVASNIAGEDELDFDVNIQVPPSFQKLWEIGNMLDTGRNGEAKDVIINNPISLYCETNAAPPPTLTWYKDGHPLTSSDKVLILPGGRVLQIPRAKVEDAGRYTCVAVNEAGEDSLQYDVRVLVPPIIKGANSDLPEEVTVLVNKSALIECLSSGSPAPRNSWQKDGQPLLEDDHHKFLSNGRILQILNTQITDIGRYVCVAENTAGSAKKYFNLNVHVPPSVIGPKSENLTVVVNNFISLTCEVSGFPPPDLSWLKNEQPIKLNTNTLIVPGGRTLQIIRAKVSDGGEYTCIAINQAGESKKKFSLTVYVPPSIKDHDSESLSVVNVREGTSVSLECESNAVPPPVITWYKNGRMITESTHVEILADGQMLHIKKAEVSDTGQYVCRAINVAGRDDKNFHLNVYVPPSIEGPEREVIVETISNPVTLTCDATGIPPPTIAWLKNHKRIENSDSLEVRILSGGSKLQIARSQHSDSGNYTCIASNMEGKAQKYYFLSIQVPPSVAGAEIPSDVSVLLGENVELVCNANGIPTPLIQWLKDGKPIASGETERIRVSANGSTLNIYGALTSDTGKYTCVATNPAGEEDRIFNLNVYVTPTIRGNKDEAEKLMTLVDTSINIECRATGTPPPQINWLKNGLPLPLSSHIRLLAAGQVIRIVRAQVSDVAVYTCVASNRAGVDNKHYNLQVFAPPNMDNSMGTEEITVLKGSSTSMACITDGTPAPSMAWLRDGQPLGLDAHLTVSTHGMVLQLLKAETEDSGKYTCIASNEAGEVSKHFILKVLEPPHINGSEEHEEISVIVNNPLELTCIASGIPAPKMTWMKDGRPLPQTDQVQTLGGGEVLRISTAQVEDTGRYTCLASSPAGDDDKEYLVRVHVPPNIAGTDEPRDITVLRNRQVTLECKSDAVPPPVITWLRNGERLQATPRVRILSGGRYLQINNADLGDTANYTCVASNIAGKTTREFILTVNVPPNIKGGPQSLVILLNKSTVLECIAEGVPTPRITWRKDGAVLAGNHARYSILENGFLHIQSAHVTDTGRYLCMATNAAGTDRRRIDLQVHVPPSIAPGPTNMTVIVNVQTTLACEATGIPKPSINWRKNGHLLNVDQNQNSYRLLSSGSLVIISPSVDDTATYECTVTNGAGDDKRTVDLTVQVPPSIADEPTDFLVTKHAPAVITCTASGVPFPSIHWTKNGIRLLPRGDGYRILSSGAIEILATQLNHAGRYTCVARNAAGSAHRHVTLHVHEPPVIQPQPSELHVILNNPILLPCEATGTPSPFITWQKEGINVNTSGRNHAVLPSGGLQISRAVREDAGTYMCVAQNPAGTALGKIKLNVQVPPVISPHLKEYVIAVDKPITLSCEADGLPPPDITWHKDGRAIVESIRQRVLSSGSLQITFVQPGDAGHYTCMAANVAGSSSTSTKLTVHVPPRIRSTEGHYTVNENSQAILPCVADGIPTPAINWKKDNVLLANLLGKYTAEPYGELILENVVLEDSGFYTCVANNAAGEDTHTVSLTVHVLPTFTELPGDVSLNKGEQLRLSCKATGIPLPKLTWTFNNNIIPAHFDSVNGHSELVIERVSKEDSGTYVCTAENSVGFVKAIGFVYVKEPPVFKGDYPSHWIEPLGGNAILNCEVKGDPTPTIQWNRKGVDIEISHRIRQLGNGSLAIYGTVNEDAGDYTCVATNEAGVVERSMSLTLQSPPIITLEPVETVINAGGKIILNCQATGEPQPTITWSRQGHSISWDDRVNVLSNNSLYIADAQKEDTSEFECVARNLMGSVLVRVPVIVQVHGGFSQWSAWRACSVTCGKGIQKRSRLCNQPLPANGGKPCQGSDLEMRNCQNKPCPVDGSWSEWSLWEECTRSCGRGNQTRTRTCNNPSVQHGGRPCEGNAVEIIMCNIRPCPVHGAWSAWQPWGTCSESCGKGTQTRARLCNNPPPAFGGSYCDGAETQMQVCNERNCPVHGKWATWASWSACSVSCGGGARQRTRGCSDPVPQYGGRKCEGSDVQSDFCNSDPCPTHGNWSPWSGWGTCSRTCNGGQMRRYRTCDNPPPSNGGRACGGPDSQIQRCNTDMCPVDGSWGSWHSWSQCSASCGGGEKTRKRLCDHPVPVKGGRPCPGDTTQVTRCNVQACPGGPQRARGSVIGNINDVEFGIAFLNATITDSPNSDTRIIRAKITNVPRSLGSAMRKIVSILNPIYWTTAKEIGEAVNGFTLTNAVFKRETQVEFATGEILQMSHIARGLDSDGSLLLDIVVSGYVLQLQSPAEVTVKDYTEDYIQTGPGQLYAYSTRLFTIDGISIPYTWNHTVFYDQAQGRMPFLVETLHASSVESDYNQIEETLGFKIHASISKGDRSNQCPSGFTLDSVGPFCADEDECAAGNPCSHSCHNAMGTYYCSCPKGLTIAADGRTCQDIDECALGRHTCHAGQDCDNTIGSYRCVVRCGSGFRRTSDGLSCQDINECQESSPCHQRCFNAIGSFHCGCEPGYQLKGRKCMDVNECRQNVCRPDQHCKNTRGGYKCIDLCPNGMTKAENGTCIDIDECKDGTHQCRYNQICENTRGSYRCVCPRGYRSQGVGRPCMDINECEQVPKPCAHQCSNTPGSFKCICPPGQHLLGDGKSCAGLERLPNYGTQYSSYNLARFSPVRNNYQPQQHYRQYSHLYSSYSEYRNSRTSLSRTRRTIRKTCPEGSEASHDTCVDIDECENTDACQHECKNTFGSYQCICPPGYQLTHNGKTCQDIDECLEQNVHCGPNRMCFNMRGSYQCIDTPCPPNYQRDPVSGFCLKNCPPNDLECALSPYALEYKLVSLPFGIATNQDLIRLVAYTQDGVMHPRTTFLMVDEEQTVPFALRDENLKGVVYTTRPLREAETYRMRVRASSYSANGTIEYQTTFIVYIAVSAYPY

SEQ ID NO: 1003 - DNA, 6343 bp, Homo sapiens
  CDS (105)..(5810)
aaccacctcacattaatggatctgaagaacatgaagagatatcagtaattgttaataacccacttgaacttacctgcattgcttctggaatcccagcccctaaaatgacctggatgaaagatggccggccccttccacagacggatcaagtgcaaactctaggaggaggagaggttcttcgaatttctactgctcaggtggaggatacaggaagatatacatgtctggcatccagtcctgcaggagatgatgataaggaatatctagtgagagtgcatgtacctcctaatattgctggaactgatgagccccgggatatcactgtgttacggaacagacaagtgacattggaatgcaagtcagatgcagtgcccccacctgtaattacttggctcagaaatggagaacggttacaggcaacacctcgagtgcgaatcctatctggagggagatacttgcaaatcaacaatgctgacctaggtgatacagccaattatacctgtgttgccagcaacattgcaggaaagactacaagagaatttattctcactgtaaatgttcctccaaacataaaggggggcccccagagccttgtaattcttttaaataagtcaactgtattggaatgcatcgctgaaggtgtgccaactccaaggataacatggagaaaggatggagctgttctagctgggaatcatgcaagatattccatcttggaaaatggattccttcatattcaatcagcacatgtcactgacactggacggtatttgtgtatggccaccaatgctgctggaacagatcgcaggcgaatagatttacaggtccatggttcactagtaattatttccccttctgtggatgacactgcaacctatgaatgtactgtgacaaacggtgctggagatgataaaagaactgtggatctcactgtccaagttccaccttccatagctgatgagcctacagatttcctagtaaccaaacatgccccagcagtaattacctgcactgcttcgggagttccatttccctcaattcactggaccaaaaatggtataagactgcttcccaggggagatggctatagaattctgtcctcaggagcaattgaaatacttgccacccaattaaaccatgctggaagatacacttgtgtcgctaggaatgcggctggctctgcacatcgacacgtgacccttcatgttcatgagcctccagtcattcagccccaaccaagtgaactacacgtcattctgaacaatcctattttattaccatgtgaagcaacagggacacccagtcctttcattacttggcaaaaagaaggcatcaatgttaacacttcaggcagaaaccatgcagttcttcctagtggcggcttacagatctccagagctgtccgagaggatgctggcacttacatgtgtgtggcccagaacccggctggtacagccttgggcaaaatcaagttaaatgtccaagttcctccagtcattagccctcatctaaaggaatatgttattgctgtggacaagcccatcacgttatcctgtgaagcagatggcctccctccgcctgacattacatggcataaagatgggcgtgcaattgtggaatctatccgccagcgcgtcctcagctctggctctctgcaaatagcatttgtccagcctggtgatgctggccattacacgtgcatggcagccaatgtagcaggatcaagcagcacaagcaccaagctcaccgtccatgtaccacccaggatcagaagtacagaaggacactacacggtcaatgagaattcacaagccattcttccatgcgtagctgatggaatccccacaccagcaattaactggaaaaaagacaatgttcttttagctaacttgttaggaaaatacactgctgaaccatatggagaactcattttagaaaatgttgtgctggaggattctggcttctatacctgtgttgctaacaatgctgcaggtgaagatacacacactgtcagcctgactgtgcatgttctccccacttttactgaacttcctggagacgtgtcattaaataaaggagaacagctacgattaagctgtaaagctactggtattccattgcccaaattaacatggaccttcaataacaatattattccagcccactttgacagtgtgaatggacacagtgaacttgttattgaaagagtgtcaaaagaggattcaggtacttatgtgtgcaccgcagagaacagcgttggctttgtgaaggcaattggatttgtttatgtgaaagaacctccagtcttcaaaggtgattatccttctaactggattgaaccacttggtgggaatgcaatcctgaattgtgaggtgaaaggagaccccaccccaaccatccagtggaacagaaagggagtggatattgaaattagccacagaatccggcaactgggcaatggctccctggccatctatggcactgttaatgaagatgccggtgactatacatgtgtagctaccaatgaagctggggtggtggagcgcagcatgagtctgactctgcaaagtcctcctattatcactcttgagccagtggaaactgttattaatgctggtggcaaaatcatattgaattgtcaggcaactggagagcctcaaccaaccattacatggtcccgtcaagggcactctatttcctgggatgaccgggttaacgtgttgtccaacaactcattatatattgctgatgctcagaaagaagatacctctgaatttgaatgcgttgctcgaaacttaatgggttctgtccttgtcagagtgccagtcatagtccaggttcatggtggattttcccagtggtctgcatggagagcctgcagtgtcacctgtggaaaaggcatccaaaagaggagtcgtctgtgcaaccagccccttccagccaatggtgggaagccctgccaaggttcagatttggaaatgcgaaactgtcaaaataagccttgtccagtggatggtagctggtcggaatggagtctttgggaagaatgcacaaggagctgtggacgcggcaaccaaaccaggaccaggacttgcaataatccatcagttcagcatggtgggcggccatgtgaagggaatgctgtggaaataattatgtgcaacattaggccttgcccagttcatggagcatggagcgcttggcagccttggggaacatgcagcgaaagttgtgggaaaggtactcagacaagagcaagactttgtaataacccaccaccagcgtttggtgggtcctactgtgatggagcagaaacacagatgcaagtttgcaatgaaagaaattgtccaattcatggcaagtgggcgacttgggccagttggagtgcctgttctgtgtcatgtggaggaggtgccagacagagaacaaggggctgctccgaccctgtgccccagtatggaggaaggaaatgcgaagggagtgatgtccagagtgatttttgcaacagtgacccttgcccaacccatggtaactggagtccttggagtggctggggaacatgcagccggacgtgtaacggagggcagatgcggcggtaccgcacatgtgataaccctcctccctccaatgggggaagagcttgtgggggaccagactcccagatccagaggtgcaacactgacatgtgtcctgtggatggaagttggggaagctggcatagttggagccagtgctctgcctcctgtggaggaggtgaaaagactcggaagcggctgtgcgaccatcctgtgccagttaaaggtggccgtccttgtcccggagacactactcaggtgaccaggtgcaatgtacaagcatgtccaggtgggccccagcgagccagaggaagtgttattggaaatattaatgatgttgaatttggaattgctttccttaatgccacaataactgatagccctaactctgatactagaataatacgtgccaaaattaccaatgtacctcgtagtcttggttcagcaatgagaaagatagtttctattctaaatcccatttattggacaacagcaaaggaaataggagaagcagtcaatggctttaccctcaccaatgcagtcttcaaaagagaaactcaagtggaatttgcaactggagaaatcttgcagatgagtcatattgcccggggcttggattccgatggttctttgctgctagatatcgttgtgagtggctatgtcctacagcttcagtcacctgctgaagtcactgtaaaggattacacagaggactacattcaaacaggtcctgggcagctgtacgcctactcaacccggctgttcaccattgatggcatcagcatcccatacacatggaaccacaccgttttctatgatcaggcacagggaagaatgcctttcttggttgaaacacttcatgcatcctctgtggaatctgactataaccagatagaagagacactgggttttaaaattcatgcttcaatatccaaaggagatcgcagtaatcagtgcccctccgggtttaccttagactcagttggacctttttgtgctgatgaggatgaatgtgcagcagggaatccctgctcccatagctgccacaatgccatggggacttactactgctcctgccctaaaggcctcaccatagctgcagatggaagaacttgtcaagatattgatgagtgtgctttgggtaggcatacctgccacgctggtcaggactgtgacaatacgattggatcttatcgctgtgtggtccgttgtggaagtggctttcgaagaacctctgatgggctgagttgtcaagatattaatgaatgtcaagaatccagcccctgtcaccagcgctgtttcaatgccataggaagtttccattgtggatgtgaacctgggtatcagctcaaaggcagaaaatgcatggatgtgaacgagtgtagacaaaatgtatgcagaccagatcagcactgtaagaacacccgtggtggctataagtgcattgatctttgtccaaatggaatgaccaaggcagaaaatggaacctgtattgatattgatgaatgtaaagatgggacccatcagtgcagatataaccagatatgtgagaatacaagaggcagctatcgttgtgtatgcccaagaggttatcggtctcaaggagttggaagaccctgcatggatattgatgaatgtgaaaatacagatgcctgcctgcatgagtgtaagaatacctttggaagttatcagtgcatctgcccacctggctatcaactcacacacaatggaaagacatgccaagatatcgatgaatgtctggagcagaatgtgcactgtggacccaatcgcatgtgcttcaacatgagaggaagctaccagtgcatcgatacaccctgtccacccaactaccaacgggatcctgcttcagggttctgcctcaagaactgtccacccaatgatttggaatgtgccttgagcccatatgccttggaatacaaactcgtctccctcccatttggaatagccaccaatcaagatttaatccggctggttgcatacacacaggatggagtgatgcatcccaggacaactttcctcatggtagatgaggaacagactgttccttttgccttgagggatgaaaacctgaaaggagtggtgtatacaacacgaccactacgagaagcagagacctaccgcatgagggtccgagcctcatcctacagtgccaatgggaccattgaatatcagaccacattcatagtttatatagctgtgtccgcctatccatactaaggaactctccaaagcctattccacatatttaaaccgcattaatcatggcaatcaagcccccttccagattactgtctcttgaacagttgcaatcttggcagcttgaaaatggtgctacactctgttttgtgtgccttccttggtacttctgaggtattttcatgatcccaccatggtcatatcttgaagtatggtctagaaaagtcccttattattttatttattacactggagcagttacttcccaaagattattctgaacatctaacaggacatatcagtgatggtttacagtagtgtagtacctaagatcattttcctgaaagccaaaccaaacaacgaaaaacaagaacaactaattcagaatcaaatagagtttttgagcatttgactatttttagaatcataaaattagttactaagtattttgatcaaagcttataaaataacttacggagatttttgtaagtattgatacattataataggacttgcctattttcatttttaagaagaaaaacaccactcat

SEQ ID NO: 1004 - protein, 1902 aa, Homo sapiens
MTWMKDGRPLPQTDQVQTLGGGEVLRISTAQVEDTGRYTCLASSPAGDDDKEYLVRVHVPPNIAGTDEPRDITVLRNRQVTLECKSDAVPPPVITWLRNGERLQATPRVRILSGGRYLQINNADLGDTANYTCVASNIAGKTTREFILTVNVPPNIKGGPQSLVILLNKSTVLECIAEGVPTPRITWRKDGAVLAGNHARYSILENGFLHIQSAHVTDTGRYLCMATNAAGTDRRRIDLQVHGSLVIISPSVDDTATYECTVTNGAGDDKRTVDLTVQVPPSIADEPTDFLVTKHAPAVITCTASGVPFPSIHWTKNGIRLLPRGDGYRILSSGAIEILATQLNHAGRYTCVARNAAGSAHRHVTLHVHEPPVIQPQPSELHVILNNPILLPCEATGTPSPFITWQKEGINVNTSGRNHAVLPSGGLQISRAVREDAGTYMCVAQNPAGTALGKIKLNVQVPPVISPHLKEYVIAVDKPITLSCEADGLPPPDITWHKDGRAIVESIRQRVLSSGSLQIAFVQPGDAGHYTCMAANVAGSSSTSTKLTVHVPPRIRSTEGHYTVNENSQAILPCVADGIPTPAINWKKDNVLLANLLGKYTAEPYGELILENVVLEDSGFYTCVANNAAGEDTHTVSLTVHVLPTFTELPGDVSLNKGEQLRLSCKATGIPLPKLTWTFNNNIIPAHFDSVNGHSELVIERVSKEDSGTYVCTAENSVGFVKAIGFVYVKEPPVFKGDYPSNWIEPLGGNAILNCEVKGDPTPTIQWNRKGVDIEISHRIRQLGNGSLAIYGTVNEDAGDYTCVATNEAGVVERSMSLTLQSPPIITLEPVETVINAGGKIILNCQATGEPQPTITWSRQGHSISWDDRVNVLSNNSLYIADAQKEDTSEFECVARNLMGSVLVRVPVIVQVHGGFSQWSAWRACSVTCGKGIQKRSRLCNQPLPANGGKPCQGSDLEMRNCQNKPCPVDGSWSEWSLWEECTRSCGRGNQTRTRTCNNPSVQHGGRPCEGNAVEIIMCNIRPCPVHGAWSAWQPWGTCSESCGKGTQTRARLCNNPPPAFGGSYCDGAETQMQVCNERNCPIHGKWATWASWSACSVSCGGGARQRTRGCSDPVPQYGGRKCEGSDVQSDFCNSDPCPTHGNWSPWSGWGTCSRTCNGGQMRRYRTCDNPPPSNGGRACGGPDSQIQRCNTDMCPVDGSWGSWHSWSQCSASCGGGEKTRKRLCDHPVPVKGGRPCPGDTTQVTRCNVQACPGGPQRARGSVIGNINDVEFGIAFLNATITDSPNSDTRIIRAKITNVPRSLGSAMRKIVSILNPIYWTTAKEIGEAVNGFTLTNAVFKRETQVEFATGEILQMSHIARGLDSDGSLLLDIVVSGYVLQLQSPAEVTVKDYTEDYIQTGPGQLYAYSTRLFTIDGISIPYTWNHTVFYDQAQGRMPFLVETLHASSVESDYNQIEETLGFKIHASISKGDRSNQCPSGFTLDSVGPFCADEDECAAGNPCSHSCHNAMGTYYCSCPKGLTIAADGRTCQDIDECALGRHTCHAGQDCDNTIGSYRCVVRCGSGFRRTSDGLSCQDINECQESSPCHQRCFNAIGSFHCGCEPGYQLKGRKCMDVNECRQNVCRPDQHCKNTRGGYKCIDLCPNGMTKAENGTCIDIDECKDGTHQCRYNQICENTRGSYRCVCPRGYRSQGVGRPCMDIDECENTDACLHECKNTFGSYQCICPPGYQLTHNGKTCQDIDECLEQNVHCGPNRMCFNMRGSYQCIDTPCPPNYQRDPASGFCLKNCPPNDLECALSPYALEYKLVSLPFGIATNQDLIRLVAYTQDGVMHPRTTFLMVDEEQTVPFALRDENLKGVVYTTRPLREAETYRMRVRASSYSANGTIEYQTTFIVYIAVSAYPY

SEQ ID NO: 1005 - DNA, 1599 bp, Homo sapiens
  CDS (25)..(1593)
gactcacgaaagaaaagccaaacgatgagtttccacaaggaggacggagtgaacagtctgtgccagaaggctctgcacatcgtcaccgagctgtgcttcgccggccaggtggagtgggagaagtgctcgggcatcttccctcgggacaggggcagccagggcggaagcagcacagatatttcagtcagcctgttagcagtcgttgtcagcttttgtggactggccttgttggttgtctcactttttgtcttctggaagctgtgttggccatgctggaaaagcaaacctgtgacttccaacatcactacccttccacagagcatttcaagtgctcctactgaagtttttgagactgaagagaaaaaagaaattaaggaaaatgaaaagccagccgtaaaagctattgagcctgcaataaaaatcagccacacttcccctgacatcccagcagaagtccaaactgctttaaaagaacatttaattaaacatgcacgtgtgcaaagacaaattactgagcctacgtcatcaacccgccacagttccttccgaagacacctgccgaggcaaatgcaggtttccagtgttgattttagcatgggcacagaacctgttttacaacgaggagaaacaacaaccagcattgggaggataaagccagaactctacaaacagaaatcagttgactctgagggcaaccaaaacgaagatgtcaaaatctgtgggaaacttaactttaccctccagtatgattatgaaaatgaacttctagttgttaaaattatcaaagctttagatctccctgctaaagacttcacaggaacttctgacccttatgtgaagatgtatcttcttccagataggaaaaagaaatttcagacccgcgtgcacagaaagactttaaatcctctatttgatgaaacttttcaatttcctgtagcatatgatcaactaagcaaccgaaaactacatttcagtgtgtatgattttgacagattttctagacatgacatgattggggaagtgattcttgataatttgtttgaagtctctgatctctccagggaagccacagtatggaaagatattcactgtgctaccacagaaagtatagacctgggtgaaatcatgttttccctttgttacctaccgacggctgggcgtatgacattgacagtcattaagtgcagaaatctgaaggcgatggatattactggctcatcagatccttatgtcaaagtgttcctgatgtgtgaaggtcgaagattaaaaaagaggaaaacaactacaaagaaaaacactctaaaccctgtgtacaatgaggccattatttttgacatccctccagagaacgtggaccaggtcagcctctccattgcggtcatggattacgatagggtaggacacaatgaggtcataggagtgtgcagaacaggactggatgctgagggtcttgggcgagaccactggaatgaaatgctggcctatcatcgaaaaccaataacgcactggcacccattgctggagttacctggccgggcgaccagttttgatagtcaaggatcctgcccttctcctaaaccaccttccacaccataatgc

SEQ ID NO: 1006 - protein, 523 aa, Homo sapiens
MSFHKEDGVNSLCQKALHIVTELCFAGQVEWEKCSGIFPRDRGSQGGSSTDISVSLLAVVVSFCGLALLVVSLFVFWKLCWPCWKSKPVTSNITTLPQSISSAPTEVFETEEKKEIKENEKPAVKAIEPAIKISHTSPDIPAEVQTALKEHLIKHARVQRQITEPTSSTRHSSFRRHLPRQMQVSSVDFSMGTEPVLQRGETTTSIGRIKPELYKQKSVDSEGNQNEDVKICGKLNFTLQYDYENELLVVKIIKALDLPAKDFTGTSDPYVKMYLLPDRKKKFQTRVHRKTLNPLFDETFQFPVAYDQLSNRKLHFSVYDFDRFSRHDMIGEVILDNLFEVSDLSREATVWKDIHCATTESIDLGEIMFSLCYLPTAGRMTLTVIKCRNLKAMDITGSSDPYVKVFLMCEGRRLKKRKTTTKKNTLNPVYNEAIIFDIPPENVDQVSLSIAVMDYDRVGHNEVIGVCRTGLDAEGLGRDHWNEMLAYHRKPITHWHPLLELPGRATSFDSQGSCPSPKPPSTP

SEQ ID NO: 1007 - DNA, 1697 bp, Homo sapiens
  CDS (78)..(1646)
cagaggggttagaggtacgggaagaggaaaagacggctaactgggaaaaaaagagaaaacgaaagaaaagccaaacgatgagtttccacaaggaggacggagtgaacagtctgtgccagaaggctctgcacatcgtcaccgagctgtgcttcgccggccaggtggagtgggagaagtgctcgggcatcttccctcgggacaggggcagccagggcggaagcagcacagatatttcagtcagcctgttagctgtcgttgtcagcttttgtggactggccttgttggttgtctcactttttgtcttctggaagctgtgttggccatgctggaaaagcaaacctgtgacttccaacatcactacgcttccacagagcatttcaagtgctcctactgaagtttttgagactgaagagaaaaaagaaattaaggaaaatgaaaagccagccgtaaaagctattgagcctgcaataaaaatcagccacacttcccctgacatcccagcagaagtccaaactgctttaaaagaacatttaattaaacatgcacgtgtgcaaagacaaattactgagcctacgtcatcaacccggcacagttccttccgaagacacctgccgaggcaaatgcaggtttccagtgttgattttagcatgggcacagaacctgttttacaacgaggagaaacaacaaccagcattgggaggataaagccagaactctacaaacagaaatcagttgactctgagggcaaccaaaacgaagatgtcaaaatctgtgggaaacttaactttaccctccagtatgattatgaaaatgaacttctagttgttaaaattatcaaagctttagatctccctgctaaagacttcacaggaacttctgacccttatgtgaagatgtatcttcttccagataggaaaaagaaatttcagacccgcgtgcacagaaagactttaaatcctctatttgatgaaacttttcaatttcctgtagcatatgatcaactaagcaaccgaaaactacatttcagtgtgtatgattttgacagattttctagacatgacatgattggggaagtgattcttgataatttgtttgaagtctctgatctctccagggaagccacagtatggaaagatattcactgtgctaccacagaaagtatagacctgggtgaaatcatgttttccctttgttacctaccgacggctgggcgtatgacattgacagtcattaagtgcagaaatctgaaggcgatggatattactggctcatcagatccttatgtcaaagtgtccctgatgtgtgaaggtcgaagattaaaaaagaggaaaacaactacaaagaaaaacactctaaaccctgtgtacaatgaggccattatttttgacatccctccagagaacgtggaccaggtcagcctctccattgcggtcatggattacgatagggtaggacacaatgaggtcataggagtgtgcagaacaggactggatgctgagggtcttgggcgagaccactggaatgaaatgctggcctatcatcgaaaaccaataacgcactggcacccattgctggagttacctggccgggcgaccagttttgatagtcaaggatcctgcccttctcctaaaccaccttccacaccataatgcctccaaaatgagaccatgatattaagcatctaggatcacgtgctc

SEQ ID NO: 1008 - protein, 523 aa, Homo sapiens
MSFHKEDGVNSLCQKALHIVTELCFAGQVEWEKCSGIFPRDRGSQGGSSTDISVSLLAVVVSFCGLALLVVSLFVFWKLCWPCWKSKPVTSNITTLPQSISSAPTEVFETEEKKEIKENEKPAVKAIEPAIKISHTSPDIPAEVQTALKEHLIKHARVQRQITEPTSSTRHSSFRRHLPRQMQVSSVDFSMGTEPVLQRGETTTSIGRIKPELYKQKSVDSEGNQNEDVKICGKLNFTLQYDYENELLVVKIIKALDLPAKDFTGTSDPYVKMYLLPDRKKKFQTRVHRKTLNPLFDETFQFPVAYDQLSNRKLHFSVYDFDRFSRHDMIGEVILDNLFEVSDLSREATVWKDIHCATTESIDLGEIMFSLCYLPTAGRMTLTVIKCRNLKAMDITGSSDPYVKVSLMCEGRRLKKRKTTTKKNTLNPVYNEAIIFDIPPENVDQVSLSIAVMDYDRVGHNEVIGVCRTGLDAEGLGRDHWNEMLAYHRKPITHWHPLLELPGRATSFDSQGSCPSPKPPSTP

SEQ ID NO: 1009 - DNA, 2855 bp, Homo sapiens
  CDS (3)..(2843)
gagggaatgcgcgcagctcacaggccctgggagtgagctggtgcccggcgacctggcacccgcgcctggatatggggcgtctacatcgtcccaggagcagcaccagctacaggaacctgccgcatctgtttctgtttttcctcttcgtgggacccttcagctgcctcgggagttacagccgggccaccgagcttctgtacagcctaaacgagggactacccgcgggggtgctcatcggcagcctggccgaggacctgcggctgctgcccaggtctgcagggaggccggacccgcagtcgcagctgccagagcgcaccggtgctgagtggaacccccctctctccttcagcctggcctcccggggactgagtggccagtacgtgaccctagacaaccgctctggggagctgcacacttcagctcaggagatcgacagggaggccctgtgtgttgaagggggtggagggactgcgtggagcggcagcgtttccatctcctcctctccttctgactcttgtcttttgctgctggatgtgcttgtcctgcctcaggaatacttcaggtttgtgaaggtgaagatcgccatcagagacatcaatgacaacgccccgcagttccctgtttcccagatctcggtgtgggtcccggaaaatgcacctgtaaacacccgactggccatagagcatcctgctgtggacccagatgttggcattaatggggttcagacctatcgcttactggactaccatggtatgttcaccctggacgtggaggagaatgagaatggggagcgcaccccctacctaattgtcatgggtgctttggacagggaaacccaggaccagtatgtgagcatcatcacagctgaggatggtgggtctccaccacttttgggcagtgccactctcaccattggcatcagtgacattaatgacaattgccctctcttcacagactcacaaatcaatgtcactgtgtatgggaatgctacagtgggcaccccaattgcagctgtccaggctgtggataaagacttggggaccaatgctcaaattacttattcttacagtcagaaagttccacaagcatctaaggatttatttcacctggatgaaaacactggagtcattaaacttttcagtaagattggaggaagtgttctggagtcccacaagctcaccatccttgctaatggaccaggctgcatccctgctgtaatcactgctcttgtgtccattattaaagttattttcagaccccctgaaattgtccctcgttacatagcaaacgagatagatggtgttgtttatctgaaagaactggaacccgttaacactcccattgcgtttttcaccataagagatccagaaggtaaatacaaggttaactgctacctggatggtgaagggccgtttaggttatcaccttacaaaccatacaataatgaatatttactagagaccacaaaacctatggactatgagctacagcagttctatgaagtagctgtggtggcttggaactctgagggatttcatgtcaaaagggtcattaaagtgcaacttttagatgacaatgataatgctccaattttccttcaacccttaatagaactaaccatcgaagagaacaactcacccaatgcctttttgactaagctgtatgctacagatgccgacagcgaggagagaggccaagtttcatattttctgggacctgatgctccatcatatttttccttagacagtgtcacaggaattctgacagtttctactcagctggaccgagaagagaaagaaaagtacagatacactgtcagagctgttgactgtgggaagccacccagagaatcagtagccactgtggccctcacagtgttggataaaaatgacaacagtcctcggtttatcaacaaggacttcagcttttttgtgcctgaaaactttccaggctatggtgagattggagtaattagtgtaacagatgctgacgctggacgaaatggatgggtcgccctctctgtggtgaaccagagtgatatttttgtcatagatacaggaaagggtatgctgagggctaaagtctctttggacagagagcagcaaagctcctatactttgtgggttgaagctgttgatgggggtgagcctgccctctcctctacagcaaaaatcacaattctccttctagatatcaatgacaaccctcctcttgttttgtttcctcagtctaatatgtcttatctgttagtactgccttctactctgccaggctccccggttacagaagtctatgctgtcgacaaagacacaggcatgaatgctgtcatagcttacagcatcatagggagaagaggtcctaggcctgagtccttcaggattgaccctaaaactggcaacattactttggaagaggcattgctgcagacagattatgggctccatcgcttactggtgaaagtgagtgatcatggttatcccgagcctctccactccacagtcatggtgaacctatttgtcaatgacactgtcagtaatgagagttacattgagagtcttttaagaaaagaaccagagattaatatagaggagaaagaaccacaaatctcaatagaaccgactcataggaaggtagaatctgtgtcttgtatgcccaccttagtagctctgtctgtaataagcttgggttccatcacactggtcacagggatgggcatatacatctgtttaaggaaaggggaaaagcatcccagggaagatgaaaatttggaagtacagattccactgaaaggaaaaattgacttgcatatgcgagagagaaagccaatggatatttctaatatttgatatttcatg

SEQ ID NO: 1010 - protein, 947 aa, Homo sapiens
GNARSSQALGVSWCPATWHPRLDMGRLHRPRSSTSYRNLPHLFLFFLFVGPFSCLGSYSRATELLYSLNEGLPAGVLIGSLAEDLRLLPRSAGRPDPQSQLPERTGAEWNPPLSFSLASRGLSGQYVTLDNRSGELHTSAQEIDREALCVEGGGGTAWSGSVSISSSPSDSCLLLLDVLVLPQEYFRFVKVKIAIRDINDNAPQFPVSQISVWVPENAPVNTRLAIEHPAVDPDVGINGVQTYRLLDYHGMFTLDVEENENGERTPYLIVMGALDRETQDQYVSIITAEDGGSPPLLGSATLTIGISDINDNCPLFTDSQINVTVYGNATVGTPIAAVQAVDKDLGTNAQITYSYSQKVPQASKDLFHLDENTGVIKLFSKIGGSVLESHKLTILANGPGCIPAVITALVSIIKVIFRPPEIVPRYIANEIDGVVYLKELEPVNTPIAFFTIRDPEGKYKVNCYLDGEGPFRLSPYKPYNNEYLLETTKPMDYELQQFYEVAVVAWNSEGFHVKRVIKVQLLDDNDNAPIFLQPLIELTIEENNSPNAFLTKLYATDADSEERGQVSYFLGPDAPSYFSLDSVTGILTVSTQLDREEKEKYRYTVRAVDCGKPPRESVATVALTVLDKNDNSPRFINKDFSFFVPENFPGYGEIGVISVTDADAGRNGWVALSVVNQSDIFVIDTGKGMLRAKVSLDREQQSSYTLWVEAVDGGEPALSSTAKITILLLDINDNPPLVLFPQSNMSYLLVLPSTLPGSPVTEVYAVDKDTGMNAVIAYSIIGRRGPRPESFRIDPKTGNITLEEALLQTDYGLHRLLVKVSDHGYPEPLHSTVMVNLFVNDTVSNESYIESLLRKEPEINIEEKEPQISIEPTHRKVESVSCMPTLVALSVISLGSITLVTGMGIYICLRKGEKHPREDENLEVQIPLKGKIDLHMRERKPMDISNI

SEQ ID NO: 1011 - DNA, 2854 bp, Homo sapiens
  CDS (2)..(2854)
gggatccgggaatgcgcgcagctcacaggccctgggagtgagctggtgcccggcgacctggcacccgcgcctggatatggggcgtctacatcgtcccaggagcagcaccagctacaggaacctgccgcatctgtttctgtttttcctcttcgtgggacccttcagctgcctcgggagttacagccgggccaccgagcttctgtacagcctaaacgagggactacccgcgggggtgctcatcggcagcctggccgaggacctgcggctgctgcccaggtctgcagggaggccggacccgcagtcgcagctgccagagcgcaccggtgctgagtggaacccccctctctccttcagcctggcctcccggggactgagtggccagtacgtgaccctagacaaccgctctggggagctgcacacttcagctcaggagatcgacagggaggccctgtgtgttgaagggggtggagggactgcgtggagcggcagcgtttccatctcctcctctccttctgactcttgtcttttgctgctggatgtgcttgtcctgcctcaggaatacttcaggtttgtgaaggtgaagatcgccatcagagacatcaatgacaacgccccgcagttccctgtttcccagatctcggtgtgggtcccggaaaatgcacctgtaaacacccgactggccatagagcatcctgctgtggacccagatgtaggcattaatggggtacagacctatcgcttactggactaccatggtatgttcaccctggacgtggaggagaatgagaatggggagcgcaccccctacctaattgtcatgggtgctttggacagggaaacccaggaccagtatgtgagcatcatcatagctgaggatggtgggtctccaccacttttgggcagtgccactctcaccattggcatcagtgacattaatgacaattgccctctcttcacagactcacaaatcaatgtcactgtgtatgggaatgctacagtgggcaccccaattgcagctgtccaggctgtggataaagacttggggaccaatgctcaaattacttattcttacagtcagaaagttccacaagcatctaaggatttatttcacctggatgaaaacactggagtcattaaacttttcagtaagattggaggaagtgttctggagtcccacaagctcaccatccttgctaatggaccaggctgcatccctgctgtaatcactgctcttgtgtccattattaaagttattttcagaccccctgaaattgtccctcgttacatagcaaacgagatagatggtgttgtttatctgaaagaactggaacccgttaacactcccattgcgtttttcaccataagagatccagaaggtaaatacaaggttaactgctacctggatggtgaagggccgtttaggttatcaccttacaaaccatacaataatgaatatttactagagaccacaaaacctatggactatgagctacagcagttctatgaagtagctgtggtggcttggaactctgagggatttcatgtcaaaagggtcattaaagtgcaacttttagatgacaatgataatgctccaattttccttcaacccttaatagaactaaccatcgaagagaacaactcacccaatgcctttttgactaagctgtatgctacagatgccgacagcgaggagagaggccaagtttcatattttctgggacctgatgctccatcatatttttccttagacagtgtcacaggaattctgacagtttctactcagctggaccgagaagagaaagaaaagtacagatacactgtcagagctgttgactgtgggaagccacccagagaatcagtagccactgtggccctcacagtgttggataaaaatgacaacagtcctcggtttatcaacaaggacttcagcttttttgtgcctgaaaactttccaggctatggtgagattggagtaattagtgtaacagatgctgacgctggacgaaatggatgggtcgccctctctgtggtgaaccagagtggtatttttgtcatagatacaggaaagggtatgctgagggctaaagtctctttggacagagagcagcaaagctcctatactttgtgggttgaagctgttgatgggggtgagcctgccctctcctctacagcaaaaatcacaattctccttctagatatcaatgacaaccctcctcttgttttgtttcctcagtctaatatgtcttatctgttagtactgccttctactctgccaggctccccggttacagaagtctatgctgtcgacaaagacacaggcatgaatgctgtcatagcttacagcatcatagggagaagaggtcctaggcctgagtccttcaggattgaccctaaaactggcaacattactttggaagaggcattgctgcagacagattatgggctccatcgcttactggtgaaagtgagtgatcatggttatcccgagcctctccactccacagtcatggtgaacctatttgtcaatgacactgtcagtaatgagagttacattgagagtcttttaagaaaagaaccagagattaatatagaggagaaagaaccacaaatctcaatagaaccgactcataggaaggtagaatctgtgtcttgtatgcccaccttagtagctctgtctgtaataagcttgggttccatcacactggtcacagggatgggcatatacatctgtttaaggaaaggggaaaagcatcccagggaagatgaaaatttggaagtacagattccactgaaaggaaaaattgacttgcatatgcgagagagaaagccaatggatatttctaatattctcgag

SEQ ID NO: 1012 - protein, 951 aa, Homo sapiens
GSGNARSSQALGVSWCPATWHPRLDMGRLHRPRSSTSYRNLPHLFLFFLFVGPFSCLGSYSRATELLYSLNEGLPAGVLIGSLAEDLRLLPRSAGRPDPQSQLPERTGAEWNPPLSFSLASRGLSGQYVTLDNRSGELHTSAQEIDREALCVEGGGGTAWSGSVSISSSPSDSCLLLLDVLVLPQEYFRFVKVKIAIRDINDNAPQFPVSQISVWVPENAPVNTRLAIEHPAVDPDVGINGVQTYRLLDYHGMFTLDVEENENGERTPYLIVMGALDRETQDQYVSIIIAEDGGSPPLLGSATLTIGISDINDNCPLFTDSQINVTVYGNATVGTPIAAVQAVDKDLGTNAQITYSYSQKVPQASKDLFHLDENTGVIKLFSKIGGSVLESHKLTILANGPGCIPAVITALVSIIKVIFRPPEIVPRYIANEIDGVVYLKELEPVNTPIAFFTIRDPEGKYKVNCYLDGEGPFRLSPYKPYNNEYLLETTKPMDYELQQFYEVAVVAWNSEGFHVKRVIKVQLLDDNDNAPIFLQPLIELTIEENNSPNAFLTKLYATDADSEERGQVSYFLGPDAPSYFSLDSVTGILTVSTQLDREEKEKYRYTVRAVDCGKPPRESVATVALTVLDKNDNSPRFINKDFSFFVPENFPGYGEIGVISVTDADAGRNGWVALSVVNQSGIFVIDTGKGMLRAKVSLDREQQSSYTLWVEAVDGGEPALSSTAKITILLLDINDNPPLVLFPQSNMSYLLVLPSTLPGSPVTEVYAVDKDTGMNAVIAYSIIGRRGPRPESFRIDPKTGNITLEEALLQTDYGLHRLLVKVSDHGYPEPLHSTVMVNLFVNDTVSNESYIESLLRKEPEINIEEKEPQISIEPTHRKVESVSCMPTLVALSVISLGSITLVTGMGIYICLRKGEKHPREDENLEVQIPLKGKIDLHMRERKPMDISNILE

SEQ ID NO: 1013 - DNA, 1020 bp, Homo sapiens
  CDS (1)..(1020)
agttacagccgggccaccgagcttctgtacagcctaaacgagggactacccgcgggggtgctcatcggcagcctggccgaggacctgcggctgctgcccaggtctgcagggaggccggacccgcagtcgcagctgccagagcgcaccggtgctgagtggaacccccctctctccttcagcctggcctcccggggactgagtggccagtacgtgaccctagacaaccgctctggggagctgcacacttcagctcaggagatcgacagggaggccctgtgtgttgaagggggtggagggactgcgtggagcggcagcgtttccatctcctcctctccttctgactcttgtcttttgctgctggatgtgcttgtcctgcctcaggaatacttcaggtttgtgaaggtgaagatcgccatcagagacatcaatgacaacgccccgcagttccctgtttcccagatctcggtgtgggtcccggaaaatgcacctgtaaacacccgactggccatagagcatcctgctgtggacccagatgtaggcattaatggggtgcagacctatcgcttactggactaccatggtatgttcaccctggacgtggaggagaatgagaatggggagcgcaccccctacctaattgtcatgggtgctttggacagggaaacccaggaccagtatgtgagcatcatcatagctgaggatggtgggtctccaccacttttgggcagtgccactctcaccattggcatcagtgacattaatgacaattgccctctcttcacagactcacaaatcaatgtcactgtgtatgggaatgctacagtgggcaccccaattgcagctgtccaggctgtggataaagacttggggaccaatgctcaaattacttattcttacagtcagaaagttccacaagcatctaaggatttatttcacctggatgaaaacactggagtcattaaacttttcagtaagattggaggaagtgttctggagtcccacaagctcaccatccttgct

SEQ ID NO: 1014 - protein, 340 aa, Homo sapiens
SYSRATELLYSLNEGLPAGVLIGSLAEDLRLLPRSAGRPDPQSQLPERTGAEWNPPLSFSLASRGLSGQYVTLDNRSGELHTSAQEIDREALCVEGGGGTAWSGSVSISSSPSDSCLLLLDVLVLPQEYFRFVKVKIAIRDINDNAPQFPVSQISVWVPENAPVNTRLAIEHPAVDPDVGINGVQTYRLLDYHGMFTLDVEENENGERTPYLIVMGALDRETQDQYVSIIIAEDGGSPPLLGSATLTIGISDINDNCPLFTDSQINVTVYGNATVGTPIAAVQAVDKDLGTNAQITYSYSQKVPQASKDLFHLDENTGVIKLFSKIGGSVLESHKLTILA

SEQ ID NO: 1015 - DNA, 1032 bp, Homo sapiens
  CDS (7)..(1026)
ggatccagttacagccgggccaccgagcttctgtacagcctaaacgagggactacccgcgggggtgctcatcggcagcctggccgaggacctgcggctgctgcccaggtctgcagggaggccggacccgcagtcgcagctgccagagcgcaccggtgctgagtggaacccccctctctccttcagcctggcctcccggggactgagtggccagtacgtgaccctagacaaccgctctggggagctgcacacttcagctcaggagatcgacagggaggccctgtgtgttgaagggggtggagggactgcgtggagcggcagcgtttccatctcctcctctccttctgactcttgtcttttgctgctggatgtgcttgtcctgcctcaggaatacttcaggtttgtgaaggtgaagatcgccatcagagacatcaatgacaacgccccgcagttccctgtttcccagatctcggtgtgggtcccggaaaatgcacctgtaaacacccgactggccatagagcatcctgctgtggacccagatgtaggcattaatggggtgcagacctatcgcttactggactaccatggtatgttcaccctggacgtggaggagaatgagaatggggagcgcaccccctacctaattgtcatgggtgctttggacagggaaacccaggaccagtatgtgagcatcatcatagctgaggatggtgggtctccaccacttttgggcagtgccactctcaccattggcatcagtgacattaatgacaattgccctctcttcacagactcacaaatcaatgtcactgtgtatgggaatgctacagtgggcaccccaattgcagctgtccaggctgtggataaagacttggggaccaatgctcaaattacttattcttacagtcagaaagttccacaagcatctaaggatttatttcacctggatgaaaacactggagtcattaaacttttcagtaagattggaggaagtgttctggagtcccacaagctcaccatccttgctctcgag

SEQ ID NO: 1016 - protein, 340 aa, Homo sapiens; identical to SEQ ID NO: 1014

SEQ ID NO: 1017 - DNA, 1390 bp, Homo sapiens
  CDS (8)..(1384)
gggatcccctgaaattgtccctcgttacatagcaaacgagatagatggtgttgtttatctgaaagaactggaacccgttaacactcccattgcgtttttcaccataagagatccagaaggtaaatacaaggttaactgctacctggatggtgaagggccgtttaggttatcaccttacaaaccatacaataatgaatatttactagagaccacaaaacctatggactatgagctacagcagttctatgaagtagctgtggtggcttggaactctgagggatttcatgtcaaaagggtcattaaagtgcaacttttagatgacaatgataatgctccaattttccttcaacccttaatagaactaaccatcgaagagaacaactcacccaatgcctttttgactaagctgtatgctacagatgccgacagcgaggagagaggccaagtttcatattttctgggacctgatgctccatcatatttttccttagacagtgtcacaggaattctgacagtttctactcagctggaccgagaagagaaagaaaagtacagatacactgtcagagctgttgactgtgggaagccacccagagaatcagtagccactgtggccctcacagtgttggataaaaatgacaacagtcctcggtttatcaacaaggacttcagcttttttgtgcctgaaaactttccaggctatggtgagattggagtaattagtgtaacagatgctgacgctggacgaaatggatgggtcgccctctctgtggtgaaccagagtgatatttttgtcatagatacaggaaagggtatgctgagggctaaagtctctttggacagagagcagcaaagctcctatactttgtgggttgaagctgttgatgggggtgagcctgccctctcctctacagcaaaaatcacaattctccttctagatatcaatgacaaccctcctcttgttttgtttcctcagtctaatatgtcttatctgttagtactgccttctactctgccaggctccccggttacagaagtctatgctgtcgacaaagacacaggcatgaatgctgtcatagcttacagcatcatagggagaagaggtcctaggcctgagtccttcaggattgaccctaaaactggcaacattactttggaagaggcattgctgcagacagattatgggctccatcgcttactggtgaaagtgagtgatcatggttatcccgagcctctccactccacagtcatggtgaacctatttgtcaatgacactgtcagtaatgagagttacattgagagtcttttaagaaaagaaccagagattaatatagaggagaaagaaccacaaatctcaatagaaccgactcataggaaggtagaactcgag

SEQ ID NO: 1018 - protein, 459 aa, Homo sapiens
PEIVPRYIANEIDGVVYLKELEPVNTPIAFFTIRDPEGKYKVNCYLDGEGPFRLSPYKPYNNEYLLETTKPMDYELQQFYEVAVVAWNSEGFHVKRVIKVQLLDDNDNAPIFLQPLIELTIEENNSPNAFLTKLYATDADSEERGQVSYFLGPDAPSYFSLDSVTGILTVSTQLDREEKEKYRYTVRAVDCGKPPRESVATVALTVLDKNDNSPRFINKDFSFFVPENFPGYGEIGVISVTDADAGRNGWVALSVVNQSDIFVIDTGKGMLRAKVSLDREQQSSYTLWVEAVDGGEPALSSTAKITILLLDINDNPPLVLFPQSNMSYLLVLPSTLPGSPVTEVYAVDKDTGMNAVIAYSIIGRRGPRPESFRIDPKTGNITLEEALLQTDYGLHRLLVKVSDHGYPEPLHSTVMVNLFVNDTVSNESYIESLLRKEPEINIEEKEPQISIEPTHRKVE

SEQ ID NO: 1019 - DNA, 1500 bp, Homo sapiens
  CDS (12)..(1475)
tgagccgagacatgagcgggacctaccgctgccagacggcccgctataatggcttcaacgtgcgcccccgtgaggcccaggtgcagctgaacgtgcagttcccgccggaggtggagcccagttcccaggacgtgcgccaggcgctgggccggcccgtgctcctgcgctgctcgctgctgcgaggcagcccccagcgcatcgcctcggctgtgtggcgtttcaaagggcagctgctgccgccgccgcctgttgttcccgccgccgccgaggcgccggatcacgcggagctgcgcctcgacgccgtaactcgcgacagcagcggcagctacgagtgcagcgtctccaacgatgtgggctcggctgcctgcctcttccaggtctccgccaaagcctacagcccggagttttacttcgacacccccaaccccacccgcagccacaagctgtccaagaactactcctacgtgctgcagtggactcagagggagcccgacgctgtcgaccctgtgctcaactacagactcagcatccgccagttgaaccagcacaatgcggtggtcaaggccatcccggtccggcgtgtggagaaggggcagctgctggagtacatcctgaccgatctccgtgtgccccacagctatgaggtccgcctcacaccctataccaccttcggggctggtgacatggcctcccgcatcatccactacacagagcgccagatccgctggcccccagtcctggctctgaggaccctgtcctctggtcccaagcagggtatcctctgcagagccccacacctcagttctgacttggtttccccgcttgctttctcagccatcaactctccgaacctttcagacaacacctgccactttgaggatgagaagatctgtggctatacccaggacctgacagacaactttgactggacgcggcagaatgccctcacccagaaccccaaacgctcccccaacactggtccccccaccgacataagtggcacccctgagggctactacatgttcatcgagacatcgaggcctcgggagctgggggaccgtgcaaggttagtgagtcccctctacaatgccagcgccaagttctactgtgtctccttcttctaccacatgtacgggaaacacatcggctccctcaaccccctggtgcggtcccggaacaaaggggctctggacacgcacgcctggtctctcagtggcaataagggcaatgtgtggcagcaggcccatgtgcccatcagccccagtgggcccttccagattatttttgagggggttcgaggcccgggctacctgggggatattgccatagatgacgtcacactgaagaagggggagtgtccccggaagcagacggatcccaataaagtggtggtgatgccgggcagtggagccccctgccagtccagcccacagctgtgggggcccatggccatcttcctcttggcgttgcagagatgatgagagctgtgtggccaccccc

SEQ ID NO: 1020 - protein, 488 aa, Homo sapiens
MSGTYRCQTARYNGFNVRPREAQVQLNVQFPPEVEPSSQDVRQALGRPVLLRCSLLRGSPQRIASAVWRFKGQLLPPPPVVPAAAEAPDHAELRLDAVTRDSSGSYECSVSNDVGSAACLFQVSAKAYSPEFYFDTPNPTRSHKLSKNYSYVLQWTQREPDAVDPVLNYRLSIRQLNQHNAVVKAIPVRRVEKGQLLEYILTDLRVPHSYEVRLTPYTTFGAGDMASRIIHYTERQIRWPPVLALRTLSSGPKQGILCRAPHLSSDLVSPLAFSAINSPNLSDNTCHFEDEKICGYTQDLTDNFDWTRQNALTQNPKRSPNTGPPTDISGTPEGYYMFIETSRPRELGDRARLVSPLYNASAKFYCVSFFYHMYGKHIGSLNPLVRSRNKGALDTHAWSLSGNKGNVWQQAHVPISPSGPFQIIFEGVRGPGYLGDIAIDDVTLKKGECPRKQTDPNKVVVMPGSGAPCQSSPQLWGPMAIFLLALQR

SEQ ID NO: 1021 - DNA, 1363 bp, Homo sapiens
  CDS (2)..(1363)
caccggtaccatgagcgggacctaccgctgccagacggcccgctataatggcttcaacgtgcgcccccgtgaggcccaggtgcagctgaacgtgcagttcccgccggaggtggagcccagttcccaggacgtgcgccaggcgctgggccggcccgtgctcctgcgctgctcgctgctgcgaggcagcccccagcgcatcgcctcggctgtgtggcgtttcaaagggcagctgctgccgccgccgcctgttgttcccgccgccgccgaggcgccggatcacgcggagctgcgcctcgacgccgtaactcgcgacagcagcggcagctacgagtgcagcgtctccaacgatgtgggctcggctgcctgcctcttccaggtctccgccaaagcctacagcccggagttttacttcgacacccccaaccccacccgcagccacaagctgtccaagaactactcctacgtgctgcagtggactcagagggagcccgacgctgtcgaccctgtgctcaactacagactcagcatccgccagttgaaccagcacaatgcggtggtcaaggccatcccggtccggcgtgtggagaaggggcagctgctggagtacatcctgaccgatctccgtgtgccccacagctatgaggtccgcctcacaccctataccaccttcggggctggtgacatggcctcccgcatcatccactacacagagcccatcaactctccgaacctttcagacaacacctgccactttgaggatgagaagatctgtggctatacccaggacctgacagacaactttgactggacgcggcagaatgccctcacccagaaccccaaacgctcccccaacactggtccccccaccgacataagtggcacccctgagggctactacatgttcatcgagacatcgaggcctcgggagctgggggaccgtgcaaggttagtgagtcccctctacaatgccagcgccaagttctactgtgtctccttcttctaccacatgtacgggaaacacatcggctccctcaacctcctggtgcggtcccggaacaaaggggctctggacacgcacgcctggtctctcagtggcaataagggcaatgtgtggcagcaggcccatgtgcccatcagccccagtgggcccttccagattatttttgagggggttcgaggcccgggctacctgggggatattgccatagatgacgtcacactgaagaagggggagtgtccccggaagcagacggatcccaataaagtggtggtgatgccgggcagtggagccccctgccagtccagcccacagctgtgggggcccatggccatcttcctcttggcgttgcagagactcgagggc

SEQ ID NO: 1022 - protein, 454 aa, Homo sapiens
TGTMSGTYRCQTARYNGFNVRPREAQVQLNVQFPPEVEPSSQDVRQALGRPVLLRCSLLRGSPQRIASAVWRFKGQLLPPPPVVPAAAEAPDHAELRLDAVTRDSSGSYECSVSNDVGSAACLFQVSAKAYSPEFYFDTPNPTRSHKLSKNYSYVLQWTQREPDAVDPVLNYRLSIRQLNQHNAVVKAIPVRRVEKGQLLEYILTDLRVPHSYEVRLTPYTTFGAGDMASRIIHYTEPINSPNLSDNTCHFEDEKICGYTQDLTDNFDWTRQNALTQNPKRSPNTGPPTDISGTPEGYYMFIETSRPRELGDRARLVSPLYNASAKFYCVSFFYHMYGKHIGSLNLLVRSRNKGALDTHAWSLSGNKGNVWQQAHVPISPSGPFQIIFEGVRGPGYLGDIAIDDVTLKKGECPRKQTDPNKVVVMPGSGAPCQSSPQLWGPMAIFLLALQRLEG

SEQ ID NO: 1023 - DNA, 1363 bp, Homo sapiens; identical to SEQ ID NO: 1021
  CDS (11)..(1354)

SEQ ID NO: 1024 - protein, 448 aa, Homo sapiens
MSGTYRCQTARYNGFNVRPREAQVQLNVQFPPEVEPSSQDVRQALGRPVLLRCSLLRGSPQRIASAVWRFKGQLLPPPPVVPAAAEAPDHAELRLDAVTRDSSGSYECSVSNDVGSAACLFQVSAKAYSPEFYFDTPNPTRSHKLSKNYSYVLQWTQREPDAVDPVLNYRLSIRQLNQHNAVVKAIPVRRVEKGQLLEYILTDLRVPHSYEVRLTPYTTFGAGDMASRIIHYTEPINSPNLSDNTCHFEDEKICGYTQDLTDNFDWTRQNALTQNPKRSPNTGPPTDISGTPEGYYMFIETSRPRELGDRARLVSPLYNASAKFYCVSFFYHMYGKHIGSLNLLVRSRNKGALDTHAWSLSGNKGNVWQQAHVPISPSGPFQIIFEGVRGPGYLGDIAIDDVTLKKGECPRKQTDPNKVVVMPGSGAPCQSSPQLWGPMAIFLLALQR

SEQ ID NO: 1025 - DNA, 1369 bp, Homo sapiens
  CDS (2)..(1369)
caccaagcttcccaccatgagcgggacctaccgctgccagacggcccgctataatggcttcaacgtgcgcccccgtgaggcccaggtgcagctgaacgtgcagttcccgccggaggtggagcccagttcccaggacgtgcgccaggcgctgggccggcccgtgctcctgcgctgctcgctgctgcgaggcagcccccagcgcatcgcctcggctgtgtggcgtttcaaagggcagctgctgccgccgccgcctgttgttcccgccgccgccgaggcgccggatcacgcggagctgcgcctcgacgccgtaactcgcgacagcagcggcagctacgagtgcagcgtctccaacgatgtgggctcggctgcctgcctcttccaggtctccgccaaagcctacagcccggagttttacttcgacacccccaaccccacccgcagccacaagctgtccaagaactactcctacgtgctgcagtggactcagagggagcccgacgctgtcgaccctgtgctcaactacagactcagcatccgccagttgaaccagcacaatgcggtggtcaaggccatcccggtccggcgtgtggagaaggggcagctgctggagtacatcctgaccgatctccgtgtgccccacagctatgaggtccgcctcacaccctataccaccttcggggctggtgacatggcctcccgcatcatccactacacagagcccatcaactctccgaacctttcagacaacacctgccactttgaggatgagaagatctgtggctatacccaggacctgacagacaactttgactggacgcggcagaatgccctcacccagaaccccaaacgctcccccaacactggtccccccaccgacataagtggcacccctgagggctactacatgttcatcgagacatcgaggcctcgggagctgggggaccgtgcaaggttagtgagtcccctctacaatgccagcgccaagttctactgtgtctccttcttctaccacatgtacgggaaacacatcggctccctcaacctcctggtgcggtcccggaacaaaggggctctggacacgcacgcctggtctctcagtggcaataagggcaatgtgtggcagcaggcccatgtgcccatcagccccagtgggcccttccagattatttttgagggggttcgaggcccgggctacctgggggatattgccatagatgacgtcacactgaagaagggggagtgtccccggaagcagacggatcccaataaagtggtggtgatgccgggcagtggagccccctgccagtccagcccacagctgtgggggcccatggccatcttcctcttggcgttgcagagagaattcggc

SEQ ID NO: 1026 - protein, 456 aa, Homo sapiens
TKLPTMSGTYRCQTARYNGFNVRPREAQVQLNVQFPPEVEPSSQDVRQALGRPVLLRCSLLRGSPQRIASAVWRFKGQLLPPPPVVPAAAEAPDHAELRLDAVTRDSSGSYECSVSNDVGSAACLFQVSAKAYSPEFYFDTPNPTRSHKLSKNYSYVLQWTQREPDAVDPVLNYRLSIRQLNQHNAVVKAIPVRRVEKGQLLEYILTDLRVPHSYEVRLTPYTTFGAGDMASRIIHYTEPINSPNLSDNTCHFEDEKICGYTQDLTDNFDWTRQNALTQNPKRSPNTGPPTDISGTPEGYYMFIETSRPRELGDRARLVSPLYNASAKFYCVSFFYHMYGKHIGSLNLLVRSRNKGALDTHAWSLSGNKGNVWQQAHVPISPSGPFQIIFEGVRGPGYLGDIAIDDVTLKKGECPRKQTDPNKVVVMPGSGAPCQSSPQLWGPMAIFLLALQREFG

SEQ ID NO: 1027 - DNA, 1249 bp, Homo sapiens
  CDS (2)..(1249)
caccaagcttagcgggacctaccgctgccagacggcccgctataatggcttcaacgtgcgcccccgtgaggcccaggtgcagctgaacgtgcagttcccgccggaggtggagcccagttcccaggacgtgcgccaggcgctgggccggcccgtgctcctgcgctgctcgctgctgcgaggcagcccccagcgcatcgcctcggctgtgtggcgtttcaaagggcagctgctgccgccgccgcctgttgttcccgccgccgccgaggcgccggatcacgcggagctgcgcctcgacgccgtaactcgcgacagcagcggcagctacgagtgcagcgtctccaacgatgtgggctcggctgcctgcctcttccaggtctccgccaaagcctacagcccggagttttacttcgacacccccaaccccacccgcagccacaagctgtccaagaactactcctacgtgctgcagtggactcagagggagcccgacgctgtcgaccctgtgctcaactacagactcagcatccgccagttgaaccagcacaatgcggtggtcaaggccatcccggtccggcgtgtggagaaggggcagctgctggagtacatcctgaccgatctccgtgtgccccacagctatgaggtccgcctcacaccctataccaccttcggggctggtgacatggcctcccgcatcatccactacacagagcccatcaactctccgaacctttcagacaacacctgccactttgaggatgagaagatctgtggctatacccaggacctgacagacaactttgactggacgcggcagaatgccctcacccagaaccccaaacgctcccccaacactggtccccccaccgacataagtggcacccctgagggctactacatgttcatcgagacatcgaggcctcgggagctgggggaccgtgcaaggttagtgagtcccctctacaatgccagcgccaagttctactgtgtctccttcttctaccacatgtacgggaaacacatcggctccctcaacctcctggtgcggtcccggaacaaaggggctctggacacgcacgcctggtctctcagtggcaataagggcaatgtgtggcagcaggcccatgtgcccatcagccccagtgggcccttccagattatttttgagggggttcgaggcccgggctacctgggggatattgccatagatgacgtcacactgaagaagggggagtgtccccgggaattcggc

SEQ ID NO: 1028 - protein, 416 aa, Homo sapiens
TKLSGTYRCQTARYNGFNVRPREAQVQLNVQFPPEVEPSSQDVRQALGRPVLLRCSLLRGSPQRIASAVWRFKGQLLPPPPVVPAAAEAPDHAELRLDAVTRDSSGSYECSVSNDVGSAACLFQVSAKAYSPEFYFDTPNPTRSHKLSKNYSYVLQWTQREPDAVDPVLNYRLSIRQLNQHNAVVKAIPVRRVEKGQLLEYILTDLRVPHSYEVRLTPYTTFGAGDMASRIIHYTEPINSPNLSDNTCHFEDEKICGYTQDLTDNFDWTRQNALTQNPKRSPNTGPPTDISGTPEGYYMFIETSRPRELGDRARLVSPLYNASAKFYCVSFFYHMYGKHIGSLNLLVRSRNKGALDTHAWSLSGNKGNVWQQAHVPISPSGPFQIIFEGVRGPGYLGDIAIDDVTLKKGECPREFG

SEQ ID NO: 1029 - DNA, 4141 bp, Homo sapiens
  CDS (135)..(4139)
tcttcgtcgccgctctctctctcacctctcagggaaagggggggacataggggcgtcgcggggccccggcgaatgcgccccccgccgcctctcgggctgcgccgcctcgcggggatgaagcaccggccgtgaagatggaggtgacctgccttctacttctggcgctgatccccttccactgccggggacaaggagtctacgctccagcccaggcgcagatcgtgcatgcgggccaggcatgtgtggtgaaagaggacaatatcagcgagcgtgtctacaccatccgggagggggacaccctcatgctgcagtgccttgtaacagggcaccctcgaccccaggtacggtggaccaagacggcaggtagcgcctcggacaagttccaggagacatcggtgttcaacgagacgctgcgcatcgagcgtattgcacgcacgcagggcggccgctactactgcaaggctgagaacggcgtgggggtgccggccatcaagtccatccgcgtggacgtgcagtacctggatgagccaatgctgacggtgcaccagacggtgagcgatgtgcgaggcaacttctaccaggagaagacggtgttcctgcgctgtactgtcaactccaacccgcctgcccgcttcatctggaagcggggttccgataccctatcccacagccaggacaatggggttgacatctatgagcccctctacactcagggggagaccaaggtcctgaagctgaagaacctgcggccccaggactatgccagctacacctgccaggtgtctgtgcgtaacgtgtgcggcatcccagacaaggccatcaccttccggctcaccaacaccacggcaccaccagccctgaagctgtctgtgaacgaaactctggtggtgaaccctggggagaatgtgacggtgcagtgtctgctgacaggcggtgatcccctcccccagctgcagtggtcccatgggcctggcccactgcccctgggtgctctggcccagggtggcaccctcagcatcccttcagtgcaggcccgggactctggctactacaactgcacagccaccaacaatgtgggcaaccctgccaagaagactgtcaacctgctggtgcgatccatgaagaacgctacattccagatcactcctgacgtgatcaaagagagtgagaacatccagctgggccaggacctgaagctatcgtgccacgtggatgcagtgccccaggagaaggtgacctaccagtggttcaagaatggcaagccggcacgcatgtccaagcggctgctggtgacccgcaatgatcctgagctgcccgcagtcaccagcagcctagagctcattgacctgcacttcagtgactatggcacctacctgtgcatggcttctttcccaggggcacccgtgcccgacctcagcgtcgaggtcaacatctcctctgagacagtgccgcccaccatcagtgtgcccaagggtagggccgtggtgaccgtgcgcgagggatcgcctgccgagctgcaatgcgaggtgcggggcaagccgcggccgccagtgctctggtcccgcgtggacaaggaggctgcactgctgccctcggggctgcccctggaggagactccggacgggaagctgcggctggagcgagtgagccgagacatgagcgggacctaccgctgccagacggcccgctataatggcttcaacgtgcgcccccgtgaggcccaggtgcagctgaacgtgcagttcccgccggaggtggagcccagttcccaggacgtgcgccaggcgctgggccggcccgtgctcctgcgctgctcgctgctgcgaggcagcccccagcgcatcgcctcggctgtgtggcgtttcaaagggcagctgctgccgccgccgcctgttgttcccgccgccgccgaggcgccggatcacgcggagctgcgcctcgacgccgtaactcgcgacagcagcggcagctacgagtgcagcgtctccaacgatgtgggctcggctgcctgcctcttccaggtctccgccaaagcctacagcccggagttttacttcgacacccccaaccccacccgcagccacaagctgtccaagaactactcctacgtgctgcagtggactcagagggagcccgacgctgtcgaccctgtgctcaactacagactcagcatccgccagttgaaccagcacaatgcggtggtcaaggccatcccggtccggcgtgtggagaaggggcagctgctggagtacatcctgaccgatctccgtgtgccccacagctatgaggtccgcctcacaccctataccaccttcggggctggtgacatggcctcccgcatcatccactacacagagcgccagatccgctggcccccagtcctggctctgaggaccctgtcctctggtcccaagcagggtatcctctgcagagccccacacctcagttctgacttggtttccccgcttgctttctcagccatcaactctccgaacctttcagacaacacctgccactttgaggatgagaagatctgtggctatacccaggacctgacagacaactttgactggacgcggcagaatgccctcacccagaaccccaaacgctcccccaacactggtccccccaccgacataagtggcacccctgagggctactacatgttcatcgagacatcgaggcctcgggagctgggggaccgtgcaaggttagtgagtcccctctacaatgccagcgccaagttctactgtgtctccttcttctaccacatgtacgggaaacacatcggctccctcaacctcctggtgcggtcccggaacaaaggggctctggacacgcacgcctggtctctcagtggcaataagggcaatgtgtggcagcaggcccatgtgcccatcagccccagtgggcccttccagattatttttgagggggttcgaggcccgggctacctgggggatattgccatagatgacgtcacactgaagaagggggagtgtccccggaagcagacggatcccaataaaggtgcaagacgggaaggagctgcctgcgatggcctgaaattccacctttcatcccctatggatgacggagagcttacagatgaccctattgaatgcaagcacctttggatccatagagtggacagtaaaggtgctcagtacatgttggctgagctgaactgcatacatgtggcccccaggttcctggtctttatggacgaagggcacaaggttggtgaaaaggactccgggggccagcccttccaagtttacactgatttctccttttaccctcatgctatccctgagaagatgtcaataatgcccacgttacaggtgggaaaactgaggcttagagaggaggaggaatctgcctacggtcacacagctgcaaaggctagagctgggaccaggagctggtctcttaaccgaccacctgagctcaagagcttttctctctggaccaacatgacccaaagtgtgcgcgagcctatcacaggtcccctgcaatgccaaacatacacgcacagcaatacacaacacctggggacatggatgaagctggaaaccatcattctcagcaaactgacacaagaacagaaaaccaaacaccacatgttctcactcaccacccagtctgccccgccctctctcttctcacctgaacttcccctctcctcaaactctcgaggccacgcctctatgtccttggatgatgatgatgacgacgacgacgatgatgatgatgatgatgacgacgatgacaatgatgatgatgatggaaggaagacctacagaatccctccaggctctgacctcagtgcttgtgggtgggtgaatgaccacatgtcgcagggagactccacaggtcctcccgatgagaagcactcttatgccaaagaggagactcaggccaaactgacaggaccaggaattagctaccctggtaaacccagctatcgactgcacccgagcggctacacaccactggagcagttcagggagaaagccaccggcatgctcaccccgtatgtctctggctctgtttcctctttctgcttccccttccccacctctgagtctctgtgttctgctcatgccaattccccttctgcctgtctctgcccgcttct

SEQ ID NO: 1030 - protein, 1335 aa, Homo sapiens
MEVTCLLLLALIPFHCRGQGVYAPAQAQIVHAGQACVVKEDNISERVYTIREGDTLMLQCLVTGHPRPQVRWTKTAGSASDKFQETSVFNETLRIERIARTQGGRYYCKAENGVGVPAIKSIRVDVQYLDEPMLTVHQTVSDVRGNFYQEKTVFLRCTVNSNPPARFIWKRGSDTLSHSQDNGVDIYEPLYTQGETKVLKLKNLRPQDYASYTCQVSVRNVCGIPDKAITFRLTNTTAPPALKLSVNETLVVNPGENVTVQCLLTGGDPLPQLQWSHGPGPLPLGALAQGGTLSIPSVQARDSGYYNCTATNNVGNPAKKTVNLLVRSMKNATFQITPDVIKESENIQLGQDLKLSCHVDAVPQEKVTYQWFKNGKPARMSKRLLVTRNDPELPAVTSSLELIDLHFSDYGTYLCMASFPGAPVPDLSVEVNISSETVPPTISVPKGRAVVTVREGSPAELQCEVRGKPRPPVLWSRVDKEAALLPSGLPLEETPDGKLRLERVSRDMSGTYRCQTARYNGFNVRPREAQVQLNVQFPPEVEPSSQDVRQALGRPVLLRCSLLRGSPQRIASAVWRFKGQLLPPPPVVPAAAEAPDHAELRLDAVTRDSSGSYECSVSNDVGSAACLFQVSAKAYSPEFYFDTPNPTRSHKLSKNYSYVLQWTQREPDAVDPVLNYRLSIRQLNQHNAVVKAIPVRRVEKGQLLEYILTDLRVPHSYEVRLTPYTTFGAGDMASRIIHYTERQIRWPPVLALRTLSSGPKQGILCRAPHLSSDLVSPLAFSAINSPNLSDNTCHFEDEKICGYTQDLTDNFDWTRQNALTQNPKRSPNTGPPTDISGTPEGYYMFIETSRPRELGDRARLVSPLYNASAKFYCVSFFYHMYGKHIGSLNLLVRSRNKGALDTHAWSLSGNKGNVWQQAHVPISPSGPFQIIFEGVRGPGYLGDIAIDDVTLKKGECPRKQTDPNKGARREGAACDGLKFHLSSPMDDGELTDDPIECKHLWIHRVDSKGAQYMLAELNCIHVAPRFLVFMDEGHKVGEKDSGGQPFQVYTDFSFYPHAIPEKMSIMPTLQVGKLRLREEEESAYGHTAAKARAGTRSWSLNRPPELKSFSLWTNMTQSVREPITGPLQCQTYTHSNTQHLGTWMKLETIILSKLTQEQKTKHHMFSLTTQSAPPSLFSPELPLSSNSRGHASMSLDDDDDDDDDDDDDDDDDDNDDDDGRKTYRIPPGSDLSACGWVNDHMSQGDSTGPPDEKHSYAKEETQAKLTGPGISYPGKPSYRLHPSGYTPLEQFREKATGMLTPYVSGSVSSFCFPFPTSESLCSAHANSPSACLCPL

SEQ ID NO: 1031 - DNA, 720 bp, Homo sapiens
  CDS (7)..(714)
ggtaccttgaaccagcacaatgcggtggtcaaggccatcccggtccggcgtgtggagaaggggcagctgctggagtacatcctgaccgatctccgtgtgccccacagctatgaggtccgcctcacaccctataccaccttcggggctggtgacatggcctcccgcatcatccactacacagagcccatcaactctccgaacctttcagacaacacctgccactttgaggatgagaagatctgtggctatacccaggacctgacagacaactttgactggacgcggcagaatgccctcacccagaaccccaaacgctcccccaacactggtccccccaccgacataagtggcacccctgagggctactacatgttcatcgagacatcgaggcctcgggagctgggggaccgtgcaaggttagtgagtcccctctacaatgcctgcgccaagttctactgtgtctccttcttctaccacatgtacgggaaacacatcggctccctcaacctcctggtgcggtcccggaacaaaggggctctggacacgcacgcctggtctctcagtggcaataagggcaatgtgtggcagcaggcccatgtgcccatcagccccagtgggcccttccagattatttttgagggggttcgaggcccgggctacctgggggatattgccatagatgacgtcacactgaagaagggggagtgtccccgggaattc

SEQ ID NO: 1032 - protein, 236 aa, Homo sapiens
LNQHNAVVKAIPVRRVEKGQLLEYILTDLRVPHSYEVRLTPYTTFGAGDMASRIIHYTEPINSPNLSDNTCHFEDEKICGYTQDLTDNFDWTRQNALTQNPKRSPNTGPPTDISGTPEGYYMFIETSRPRELGDRARLVSPLYNACAKFYCVSFFYHMYGKHIGSLNLLVRSRNKGALDTHAWSLSGNKGNVWQQAHVPISPSGPFQIIFEGVRGPGYLGDIAIDDVTLKKGECPR

SEQ ID NO: 1033 - DNA, 4169 bp, Homo sapiens
  CDS (135)..(4079)
tcttcgtcgccgctctctctctcacctctcagggaaagggggggacataggggcgtcgcggggccccggcgaatgcgccccccgccgcctctcgggctgcgccgcctcgcggggatgaagcaccggccgtgaagatggaggtgacctgccttctacttctggcgctgatccccttccactgccggggacaaggagtctacgctccagcccaggcgcagatcgtgcatgcgggccaggcatgtgtggtgaaagaggacaatatcagcgagcgtgtctacaccatccgggagggggacaccctcatgctgcagtgccttgtaacagggcaccctcgaccccaggtacggtggaccaagacggcaggtagcgcctcggacaagttccaggagacatcggtgttcaacgagacgctgcgcatcgagcgtattgcacgcacgcagggcggccgctactactgcaaggctgagaacggcgtgggggtgccggccatcaagtccatccgcgtggacgtgcagtacctggatgagccaatgctgacggtgcaccagacggtgagcgatgtgcgaggcaacttctaccaggagaagacggtgttcctgcgctgtactgtcaactccaacccgcctgcccgcttcatctggaagcggggttccgataccctatcccacagccaggacaatggggttgacatctatgagcccctctacactcagggggagaccaaggtcctgaagctgaagaacctgcggccccaggactatgccagctacacctgccaggtgtctgtgcgtaacgtgtgcggcatcccagacaaggccatcaccttccggctcaccaacaccacggcaccaccagccctgaagctgtctgtgaacgaaactctggtggtgaaccctggggagaatgtgacggtgcagtgtctgctgacaggcggtgatcccctcccccagctgcagtggtcccatgggcctggcccactgcccctgggtgctctggcccagggtggcaccctcagcatcccttcagtgcaggcccgggactctggctactacaactgcacagccaccaacaatgtgggcaaccctgccaagaagactgtcaacctgctggtgcgatccatgaagaacgctacattccagatcactcctgacgtgatcaaagagagtgagaacatccagctgggccaggacctgaagctatcgtgccacgtggatgcagtgccccaggagaaggtgacctaccagtggttcaagaatggcaagccggcacgcatgtccaagcggctgctggtgacccgcaatgatcctgagctgcccgcagtcaccagcagcctagagctcattgacctgcacttcagtgactatggcacctacctgtgcatggcttctttcccaggggcacccgtgcccgacctcagcgtcgaggtcaacatctcctctgagacagtgccgcccaccatcagtgtgcccaagggtagggccgtggtgaccgtgcgcgagggatcgcctgccgagctgcaatgcgaggtgcggggcaagccgcggccgccagtgctctggtcccgcgtggacaaggaggctgcactgctgccctcggggctgcccctggaggagactccggacgggaagctgcggctggagcgagtgagccgagacatgagcgggacctaccgctgccagacggcccgctataatggcttcaacgtgcgcccccgtgaggcccaggtgcagctgaacgtgcagttcccgccggaggtggagcccagttcccaggacgtgcgccaggcgctgggccggcccgtgctcctgcgctgctcgctgctgcgaggcagcccccagcgcatcgcctcggctgtgtggcgtttcaaagggcagctgctgccgccgccgcctgttgttcccgccgccgccgaggcgccggatcacgcggagctgcgcctcgacgccgtaactcgcgacagcagcggcagctacgagtgcagcgtctccaacgatgtgggctcggctgcctgcctcttccaggtctccgccaaagcctacagcccggagttttacttcgacacccccaaccccacccgcagccacaagctgtccaagaactactcctacgtgctgcagtggactcagagggagcccgacgctgtcgaccctgtgctcaactacagactcagcatccgccagttgaaccagcacaatgcggtggtcaaggccatcccggtccggcgtgtggagaaggggcagctgctggagtacatcctgaccgatctccgtgtgccccacagctatgaggtccgcctcacaccctataccaccttcggggctggtgacatggcctcccgcatcatccactacacagagcccatcaactctccgaacctttcagacaacacctgccactttgaggatgagaagatctgtggctatacccaggacctgacagacaactttgactggacgcggcagaatgccctcacccagaaccccaaacgctcccccaacactggtccccccaccgacataagtggcacccctgagggctactacatgttcatcgagacatcgaggcctcgggagctgggggaccgtgcaaggttagtgagtcccctctacaatgccagcgccaagttctactgtgtctccttcttctaccacatgtacgggaaacacatcggctccctcaacctcctggtgcggtcccggaacaaaggggctctggacacgcacgcctggtctctcagtggcaataagggcaatgtgtggcagcaggcccatgtgcccatcagccccagtgggcccttccagattatttttgagggggttcgaggcccgggctacctgggggatattgccatagatgacgtcacactgaagaagggggagtgtccccggaagcagacggatcccaataaaggtgcaagacgggaaggagctgcctgcgatggcctgaaattccacctttcatcccctatggatgacggagagcttacagatgaccctattgaatgcaagcacctttggatccatagagtggacagtaaaggtgctcagtacatgttggctgagctgaactgcatacatgtggcccccaggttcctggtctttatggacgaagggcacaaggttggtgaaaaggactccgggggccagcccttccaagtttacactgatttctccttttaccctcatgctatccctgagaagatgtcaataatgcccacgttacaggtgggaaaactgaggcttagagaggaggaggaatctgcctacggtcacacagctgcaaaggctagagctgggaccaggagctggtctcttaaccgaccacctgagctcaagagcttttctctctggaccaacatgacccaaagtgtgcgcgagcctatcacaggtcccctgcaatgccaaacatacacgcacagcaatacacaacacctggggacatggatgaagctggaaaccatcattctcagcaaactgacacaagaacagaaaaccaaacaccacatgttctcactcaccacccagtctgccccgccctctctcttctcacctgaacttcccctctcctcaaactctcgaggccacgcctctatgtccttggatgatgatgatgacgacgacgacgatgatgatgatgatgatgacgacgatgacaatgatgatgatgatggaaggaagacctacagaatccctccaggctctgacctcagtgcttgtgggtgggtgaatgaccacatgtcgcagggagactccacaggtcctcccgatgagaagcactcttatgccaaagaggagactcaggccaaactgacaggaccaggaattagctaccctggtaaacccagctatcgactgcacccgagcggctacacaccactggagcagttcagggagaaagccaccggcatgctcaccccgtatgtctctggctctgtttcctctttctgcttccccttccccacctctgagtctctgtgttctgctcatgccaattccccttctgcctgtctctgcccgcttctctctgggctggtctctccgagactctgttcccttggctggcatgccctccacctcccctgatggttcagcagagatgaagccggcctggctcatgggtgtgggtaatgtactagtgcaggagagtggtggggcccagtctgggtgcag

SEQ ID NO: 1034 - protein, 1315 aa, Homo sapiens
MEVTCLLLLALIPFHCRGQGVYAPAQAQIVHAGQACVVKEDNISERVYTIREGDTLMLQCLVTGHPRPQVRWTKTAGSASDKFQETSVFNETLRIERIARTQGGRYYCKAENGVGVPAIKSIRVDVQYLDEPMLTVHQTVSDVRGNFYQEKTVFLRCTVNSNPPARFIWKRGSDTLSHSQDNGVDIYEPLYTQGETKVLKLKNLRPQDYASYTCQVSVRNVCGIPDKAITFRLTNTTAPPALKLSVNETLVVNPGENVTVQCLLTGGDPLPQLQWSHGPGPLPLGALAQGGTLSIPSVQARDSGYYNCTATNNVGNPAKKTVNLLVRSMKNATFQITPDVIKESENIQLGQDLKLSCHVDAVPQEKVTYQWFKNGKPARMSKRLLVTRNDPELPAVTSSLELIDLHFSDYGTYLCMASFPGAPVPDLSVEVNISSETVPPTISVPKGRAVVTVREGSPAELQCEVRGKPRPPVLWSRVDKEAALLPSGLPLEETPDGKLRLERVSRDMSGTYRCQTARYNGFNVRPREAQVQLNVQFPPEVEPSSQDVRQALGRPVLLRCSLLRGSPQRIASAVWRFKGQLLPPPPVVPAAAEAPDHAELRLDAVTRDSSGSYECSVSNDVGSAACLFQVSAKAYSPEFYFDTPNPTRSHKLSKNYSYVLQWTQREPDAVDPVLNYRLSIRQLNQHNAVVKAIPVRRVEKGQLLEYILTDLRVPHSYEVRLTPYTTFGAGDMASRIIHYTEPINSPNLSDNTCHFEDEKICGYTQDLTDNFDWTRQNALTQNPKRSPNTGPPTDISGTPEGYYMFIETSRPRELGDRARLVSPLYNASAKFYCVSFFYHMYGKHIGSLNLLVRSRNKGALDTHAWSLSGNKGNVWQQAHVPISPSGPFQIIFEGVRGPGYLGDIAIDDVTLKKGECPRKQTDPNKGARREGAACDGLKFHLSSPMDDGELTDDPIECKHLWIHRVDSKGAQYMLAELNCIHVAPRFLVFMDEGHKVGEKDSGGQPFQVYTDFSFYPHAIPEKMSIMPTLQVGKLRLREEEESAYGHTAAKARAGTRSWSLNRPPELKSFSLWTNMTQSVREPITGPLQCQTYTHSNTQHLGTWMKLETIILSKLTQEQKTKHHMFSLTTQSAPPSLFSPELPLSSNSRGHASMSLDDDDDDDDDDDDDDDDDDNDDDDGRKTYRIPPGSDLSACGWVNDHMSQGDSTGPPDEKHSYAKEETQAKLTGPGISYPGKPSYRLHPSGYTPLEQFREKATGMLTPYVSGSVSSFCFPFPTSESLCSAHANSPSACLCPLLSGLVSPRLCSLGWHALHLP

SEQ ID NO: 1035 - DNA, 720 bp, Homo sapiens
  CDS (7)..(714)
ggatccttgaaccagcacaatgcggtggtcaaggccatcccggtccggcgtgtggagaaggggcagctgctggagtacatcctgaccgatctccgtgtgccccacagctatgaggtccgcctcacaccctataccaccttcggggctggtgacatggcctcccgcatcatccactacacagagcccatcaactctccgaacctttcagacaacacctgccactttgaggatgagaagatctgtggctatacccaggacctgacagacaactttgactggacgcggcagaatgccctcacccagaaccccaaacgctcccccaacactggtccccccaccgacataagtggcacccctgagggctactacatgttcatcgagacatcgaggcctcgggagctgggggaccgtgcaaggttagtgagtcccctctacaatgcctgcgccaagttctactgtgtctccttcttctaccacatgtacgggaaacacatcggctccctcaacctcctggtgcggtcccggaacaaaggggctctggacacgcacgcctggtctctcagtggcaataagggcaatgtgtggcagcaggcccatgtgcccatcagccccagtgggcccttccagattatttttgagggggttcgaggcccgggctacctgggggatattgccatagatgacgtcacactgaagaagggggagtgtccccggctcgag

SEQ ID NO: 1036 - protein, 236 aa, Homo sapiens; identical to SEQ ID NO: 1032

SEQ ID NO: 1037 - DNA, 1828 bp, Homo sapiens
  CDS (12)..(1520)
tgagccgagacatgagcgggacctaccgctgccagacggcccgctataatggcttcaacgtgcgcccccgtgaggcccaggtgcagctgaacgtgcagttcccgccggaggtggagcccagttcccaggacgtgcgccaggcgctgggccggcccgtgctcctgcgctgctcgctgctgcgaggcagcccccagcgcatcgcctcggctgtgtggcgtttcaaagggcagctgctgccgccgccgcctgttgttcccgccgccgccgaggcgccggatcacgcggagctgcgcctcgacgccgtaactcgcgacagcagcggcagctacgagtgcagcgtctccaacgatgtgggctcggctgcctgcctcttccaggtctccgccaaagcctacagcccggagttttacttcgacacccccaaccccacccgcagccacaagctgtccaagaactactcctacgtgctgcagtggactcagagggagcccgacgctgtcgaccctgtgctcaactacagactcagcatccgccagttgaaccagcacaatgcggtggtcaaggccatcccggtccggcgtgtggagaaggggcagctgctggagtacatcctgaccgatctccgtgtgccccacagctatgaggtccgcctcacaccctataccaccttcggggctggtgacatggcctcccgcatcatccactacacagagcgccagatccgctggcccccagtcctggctctgaggaccctgtcctctggtcccaagcagggtatcctctgcagagccccacacctcagttctgacttggtttccccgcttgctttctcagccatcaactctccgaacctttcagacaacacctgccactttgaggatgagaagatctgtggctatacccaggacctgacagacaactttgactggacgcggcagaatgccctcacccagaaccccaaacgctcccccaacactggtccccccaccgacataagtggcacccctgagggctactacatgttcatcgagacatcgaggcctcgggagctgggggaccgtgcaaggttagtgagtcccctctacaatgccagcgccaagttctactgtgtctccttcttctaccacatgtacgggaaacacatcggctccctcaaccccctggtgcggtcccggaacaaaggggctctggacacgcacgcctggtctctcagtggcaataagggcaatgtgtggcagcaggcccatgtgcccatcagccccagtgggcccttccagattatttttgagggggttcgaggcccgggctacctgggggatattgccatagatgacgtcacactgaagaagggggagtgtccccggaagcagacggatcccaataaaggtgcaagacgggaaggaggtgggggagctgaatctggagggagctgtgcgtggcgggggttcctgtctgttgagggagggtgttcgggtctgaataggggttcagactgtctgatgatgggaatcaggtggctctgactgtgttaacgtgtgcccacaactcacgtcaggctgagaactggtgtaacaccatgagaaagcttggcccccaccatcgtgatgagcataccgacctggtcaccggaacacaaacaccaacaaccacagagggcgcctcagaatacccagagggcccaatacgccgacccgctgtcacgagcgcccacgagcggcagaacacgacaggcacacaaccagccggagcaagacggagccgagagccccggggacatagaccccagcaagcgacacacaaggacgcgcacagagcgcacacactaaca

SEQ ID NO: 1038 - protein, 503 aa, Homo sapiens
MSGTYRCQTARYNGFNVRPREAQVQLNVQFPPEVEPSSQDVRQALGRPVLLRCSLLRGSPQRIASAVWRFKGQLLPPPPVVPAAAEAPDHAELRLDAVTRDSSGSYECSVSNDVGSAACLFQVSAKAYSPEFYFDTPNPTRSHKLSKNYSYVLQWTQREPDAVDPVLNYRLSIRQLNQHNAVVKAIPVRRVEKGQLLEYILTDLRVPHSYEVRLTPYTTFGAGDMASRIIHYTERQIRWPPVLALRTLSSGPKQGILCRAPHLSSDLVSPLAFSAINSPNLSDNTCHFEDEKICGYTQDLTDNFDWTRQNALTQNPKRSPNTGPPTDISGTPEGYYMFIETSRPRELGDRARLVSPLYNASAKFYCVSFFYHMYGKHIGSLNPLVRSRNKGALDTHAWSLSGNKGNVWQQAHVPISPSGPFQIIFEGVRGPGYLGDIAIDDVTLKKGECPRKQTDPNKGARREGGGGAESGGSCAWRGFLSVEGGCSGLNRGSDCLMMGIRWL

SEQ ID NO: 1039 - DNA, 1369 bp, Homo sapiens; identical to SEQ ID NO: 1025
  CDS (17)..(1369)

SEQ ID NO: 1040 - protein, 451 aa, Homo sapiens
MSGTYRCQTARYNGFNVRPREAQVQLNVQFPPEVEPSSQDVRQALGRPVLLRCSLLRGSPQRIASAVWRFKGQLLPPPPVVPAAAEAPDHAELRLDAVTRDSSGSYECSVSNDVGSAACLFQVSAKAYSPEFYFDTPNPTRSHKLSKNYSYVLQWTQREPDAVDPVLNYRLSIRQLNQHNAVVKAIPVRRVEKGQLLEYILTDLRVPHSYEVRLTPYTTFGAGDMASRIIHYTEPINSPNLSDNTCHFEDEKICGYTQDLTDNFDWTRQNALTQNPKRSPNTGPPTDISGTPEGYYMFIETSRPRELGDRARLVSPLYNASAKFYCVSFFYHMYGKHIGSLNLLVRSRNKGALDTHAWSLSGNKGNVWQQAHVPISPSGPFQIIFEGVRGPGYLGDIAIDDVTLKKGECPRKQTDPNKVVVMPGSGAPCQSSPQLWGPMAIFLLALQREFG

SEQ ID NO: 1041 - DNA, 2907 bp, Homo sapiens
  CDS (10)..(2895)
ggccgctgaatgctagctagaattcagcggccgctgaattctaggcgctgccgagggaatgcgcgcagctcacaggccctgggagtgagctggtgcccggcgacctggcacccgcgcctggatatggggcgtctacatcgtcccaggagcagcaccagctacaggaacctgccgcatctgtttctgtttttcctcttcgtgggacccttcagctgcctcgggagttacagccgggccaccgagcttctgtacagcctaaacgagggactacccgcgggggtgctcatcggcagcctggccgaggacctgcggctgctgcccaggtctgcagggaggccggacccgcagtcgcagctgccagagcgcaccggtgctgagtggaacccccctctctccttcagcctggcctcccggggactgagtggccagtacgtgaccctagacaaccgctctggggagctgcacacttcagctcaggagatcgacagggaggccctgtgtgttgaagggggtggagggactgcgtggagcggcagcgtttccatctcctcctctccttctgactcttgtcttttgctgctggatgtgcttgtcctgcctcaggaatacttcaggtttgtgaaggtgaagatcgccatcagagacatcaatgacaacgccccgcagttccctgtttcccagatctcggtgtgggtcccggaaaatgcacctgtaaacacccgactggccatagagcatcctgctgtggacccagatgtaggcattaatggggtacagacctatcgcttactggactaccatggtatgttcaccctggacgtggaggagaatgagaatggggagcgcaccccctacctaattgtcatgggtgctttggacagggaaacccaggaccagtatgtgagcatcatcatagctgaggatggtgggtctccaccacttttgggcagtgccactctcaccattggcatcagtgacattaatgacaattgccctctcttcacagactcacaaatcaatgtcactgtgtatgggaatgctacagtgggcaccccaattgcagctgtccaggctgtggataaagacttggggaccaatgctcaaattacttattcttacagtcagaaagttccacaagcatctaaggatttatttcacctggatgaaaacactggagtcattaaacttttcagtaagattggaggaagtgttctggagtcccacaagctcaccatccttgctaatggaccaggctgcatccctgctgtaatcactgctcttgtgtccattattaaagttattttcagaccccctgaaattgtccctcgttacatagcaaacgagatagatggtgttgtttatctgaaagaactggaacccgttaacactcccattgcgtttttcaccataagagatccagaaggtaaatacaaggttaactgctacctggatggtgaagggccgtttaggttatcaccttacaaaccatacaataatgaatatttactagagaccacaaaacctatggactatgagctacagcagttctatgaagtagctgtggtggcttggaactctgagggatttcatgtcaaaagggtcattaaagtgcaacttttagatgacaatgataatgctccaattttccttcaacccttaatagaactaaccatcgaagagaacaactcacccaatgcctttttgactaagctgtatgctacagatgccgacagcgaggagagaggccaagtttcatattttctgggacctgatgctccatcatatttttccttagacagtgtcacaggaattctgacagtttctactcagctggaccgagaagagaaagaaaagtacagatacactgtcagagctgttgactgtgggaagccacccagagaatcagtagccactgtggccctcacagtgttggataaaaatgacaacagtcctcggtttatcaacaaggacttcagcttttttgtgcctgaaaactttccaggctatggtgagattggagtaattagtgtaacagatgctgacgctggacgaaatggatgggtcgccctctctgtggtgaaccagagtgatatttttgtcatagatacaggaaagggtatgctgagggctaaagtctctttggacagagagcagcaaagctcctatactttgtgggttgaagctgttgatgggggtgagcctgccctctcctctacagcaaaaatcacaattctccttctagatatcaatgacaaccctcctcttgttttgtttcctcagtctaatatgtcttatctgttagtactgccttctactctgccaggctccccggttacagaagtctatgctgtcgacaaagacacaggcatgaatgctgtcatagcttacagcatcatagggagaagaggtcctaggcctgagtccttcaggattgaccctaaaactggcaacattactttggaagaggcattgctgcagacagattatgggctccatcgcttactggtgaaagtgagtgatcatggttatcccgagcctctccactccacagtcatggtgaacctatttgtcaatgacactgtcagtaatgagagttacattgagagtcttttaagaaaagaaccagagattaatatagaggagaaagaaccacaaatctcaatagaaccgactcataggaaggtagaatctgtgtcttgtatgcccaccttagtagctctgtctgtaataagcttgggttccatcacactggtcacagggatgggcatatacatctgtttaaggaaaggggaaaagcatcccagggaagatgaaaatttggaagtacagattccactgaaaggaaaaattgacttgcatatgcgagagagaaagccaatggatatttctaatatttgatatttcatg

SEQ ID NO: 1042 - protein, 962 aa, Homo sapiens
MLARIQRPLNSRRCRGNARSSQALGVSWCPATWHPRLDMGRLHRPRSSTSYRNLPHLFLFFLFVGPFSCLGSYSRATELLYSLNEGLPAGVLIGSLAEDLRLLPRSAGRPDPQSQLPERTGAEWNPPLSFSLASRGLSGQYVTLDNRSGELHTSAQEIDREALCVEGGGGTAWSGSVSISSSPSDSCLLLLDVLVLPQEYFRFVKVKIAIRDINDNAPQFPVSQISVWVPENAPVNTRLAIEHPAVDPDVGINGVQTYRLLDYHGMFTLDVEENENGERTPYLIVMGALDRETQDQYVSIIIAEDGGSPPLLGSATLTIGISDINDNCPLFTDSQINVTVYGNATVGTPIAAVQAVDKDLGTNAQITYSYSQKVPQASKDLFHLDENTGVIKLFSKIGGSVLESHKLTILANGPGCIPAVITALVSIIKVIFRPPEIVPRYIANEIDGVVYLKELEPVNTPIAFFTIRDPEGKYKVNCYLDGEGPFRLSPYKPYNNEYLLETTKPMDYELQQFYEVAVVAWNSEGFHVKRVIKVQLLDDNDNAPIFLQPLIELTIEENNSPNAFLTKLYATDADSEERGQVSYFLGPDAPSYFSLDSVTGILTVSTQLDREEKEKYRYTVRAVDCGKPPRESVATVALTVLDKNDNSPRFINKDFSFFVPENFPGYGEIGVISVTDADAGRNGWVALSVVNQSDIFVIDTGKGMLRAKVSLDREQQSSYTLWVEAVDGGEPALSSTAKITILLLDINDNPPLVLFPQSNMSYLLVLPSTLPGSPVTEVYAVDKDTGMNAVIAYSIIGRRGPRPESFRIDPKTGNITLEEALLQTDYGLHRLLVKVSDHGYPEPLHSTVMVNLFVNDTVSNESYIESLLRKEPEINIEEKEPQISIEPTHRKVESVSCMPTLVALSVISLGSITLVTGMGIYICLRKGEKHPREDENLEVQIPLKGKIDLHMRERKPMDISNI

SEQ ID NO: 1043 - DNA, 1377 bp, Homo sapiens
  CDS (1)..(1377)
ggatcccctcgttacatagcaaacgagatagatggtgttgtttatctgaaagaactggaacccgttaacactcccattgcgtttttcaccataagagatccagaaggtaaatacaaggttaactgctacctggatggtgaagggccgtttaggttatcaccttacaaaccatacaataatgaatatttactagagaccacaaaacctatggactatgagctacagcagttctatgaagtagctgtggtggcttggaactctgagggatttcatgtcaaaagggtcattaaagtgcaacttttagatgacaatgataatgctccaattttccttcaacccttaatagaactaaccatcgaagagaacaactcacccaatgcctttttgactaaggtgtatgctacagatgccgacagcgaggagagaggccaagtttcatattttctgggacctgatgctccatcatatttttccttagacagtgtcacaggaattctgacagtttctactcagctggaccgagaagagaaagaaaagtacagatacactgtcagagctgttgactgtgggaagccacccagagaatcagtagccactgtggccctcacagtgttggataaaaatgacaacagtcctcggtttatcaacaaggacttcagcttttttgtgcctgaaaactttccaggctatggtgagattggagtaattagtgtaacagatgctgacgctggacgaaatggatgggtcgccctctctgtggtgaaccagagtgatatttttgtcatagatacaggaaagggtatgctgagggctaaagtctctttggacagagagcagcaaagctcctatactttgtgggttgaagctgttgatgggggtgagcctgccctctcctctacagcaaaaatcacaattctccttctagatatcaatgacaaccctcctcttgttttgtttcctcagtctaatatgtcttatctgttagtactgccttctactctgccaggctccccggttacagaagtctatgctgtcgacaaagacacaggcatgaatgctgtcatagcttacagcatcatagggagaagaggtcctaggcctgagtccttcaggattgaccctaaaactggcaacattactttggaagaggcattgctgcagacagattatgggctccatcgcttactggtgaaagtgagtgatcatggttatcccgagcctctccactccacagtcatggtgaacctatttgtcaatgacactgtcagtaatgagagttacattgagagtcttttaagaaaagaaccagagattaatatagaggagaaagaaccacaaatctcaatagaaccgactcataggaaggtagaactcgag

SEQ ID NO: 1044 - protein, 459 aa, Homo sapiens
GSPRYIANEIDGVVYLKELEPVNTPIAFFTIRDPEGKYKVNCYLDGEGPFRLSPYKPYNNEYLLETTKPMDYELQQFYEVAVVAWNSEGFHVKRVIKVQLLDDNDNAPIFLQPLIELTIEENNSPNAFLTKVYATDADSEERGQVSYFLGPDAPSYFSLDSVTGILTVSTQLDREEKEKYRYTVRAVDCGKPPRESVATVALTVLDKNDNSPRFINKDFSFFVPENFPGYGEIGVISVTDADAGRNGWVALSVVNQSDIFVIDTGKGMLRAKVSLDREQQSSYTLWVEAVDGGEPALSSTAKITILLLDINDNPPLVLFPQSNMSYLLVLPSTLPGSPVTEVYAVDKDTGMNAVIAYSIIGRRGPRPESFRIDPKTGNITLEEALLQTDYGLHRLLVKVSDHGYPEPLHSTVMVNLFVNDTVSNESYIESLLRKEPEINIEEKEPQISIEPTHRKVELE

SEQ ID NO: 1045 - DNA, 1377 bp, Homo sapiens
  CDS (1)..(1377)
ggatcccctcgttacatagcaaacgagatagatggtgtggtttatctgaaagaactggaacccgttaacactcccattgcgtttttcaccataagagatccagaaggtaaatacaaggttaactgctacctggatggtgaagggccgtttaggttatcaccttacaaaccatacaataatgaatatttactagagaccacaaaacctatggactatgagctacagcagttctatgaagtagctgtggtggcttggaactctgagggatttcatgtcaaaagggtcattaaagtgcaacttttagatgacaatgataatgctccaattttccttcaacccttaatagaactaaccatcgaagagaacaactcacccaatgcctttttgactaagctgtatgctacagatgccgacagcgaggagagaggccaagtttcatattttctgggacctgatgctccatcatatttttccttagacagtgtcacaggaattctgacagtttctactcagctggaccgagaagagaaagaaaagtacagatacactgtcagagctgttgactgtgggaagccacccagagaatcagtagccactgtggccctcacagtgttggataaaaatgacaacagtcctcggtttatcaacaaggacttcagcttttttgtgcctgaaaactttccaggctatggtgagattggagtaattagtgtaacagatgctgacgctggacgaaatggatgggtcgccctctctgtggtgaaccagagtgatatttttgtcatagatacaggaaagggtatgctgagggctaaagtctctttggacagagagcagcaaagctcctatactttgtgggttgaagctgttgatgggggtgagcctgccctctcctctacagcaaaaatcacaattctccttctagatatcaatgacaaccctcctcttgttttgtttcctcagtctaatatgtcttatctgttagtactgccttctactctgctaggctccccggttacagaagtctatgctgtcgacaaagacacaggcatgaatgctgtcatagcttacagcatcatagggagaagaggtcctaggcctgagtccttcaggattgaccctaaaactggcaacattactttggaagaggcattgctgcagacagattatgggctccatcgcttactggtgaaagtgagtgatcatggttatcccgagcctctccactccacagtcatggtgaacctatttgtcaatgacactgtcagtaatgagagttacattgagagtcttttaagaaaagaaccagagattaatatagaggagaaagaaccacaaatctcaatagaaccgactcataggaaggtagaactcgag

SEQ ID NO: 1046 - protein, 459 aa, Homo sapiens
GSPRYIANEIDGVVYLKELEPVNTPIAFFTIRDPEGKYKVNCYLDGEGPFRLSPYKPYNNEYLLETTKPMDYELQQFYEVAVVAWNSEGFHVKRVIKVQLLDDNDNAPIFLQPLIELTIEENNSPNAFLTKLYATDADSEERGQVSYFLGPDAPSYFSLDSVTGILTVSTQLDREEKEKYRYTVRAVDCGKPPRESVATVALTVLDKNDNSPRFINKDFSFFVPENFPGYGEIGVISVTDADAGRNGWVALSVVNQSDIFVIDTGKGMLRAKVSLDREQQSSYTLWVEAVDGGEPALSSTAKITILLLDINDNPPLVLFPQSNMSYLLVLPSTLLGSPVTEVYAVDKDTGMNAVIAYSIIGRRGPRPESFRIDPKTGNITLEEALLQTDYGLHRLLVKVSDHGYPEPLHSTVMVNLFVNDTVSNESYIESLLRKEPEINIEEKEPQISIEPTHRKVELE

SEQ ID NO: 1047 - DNA, 1377 bp, Homo sapiens
  CDS (1)..(1377)
ggatcccctcgttacatagcaaacgagatagatggtgttgtttatctgaaagaactggaacccgttaacactcccattgcgcttttcaccataagagatccagaaggtaaatacaaggttaactgctacctggatggtgaagggccgtttaggttatcaccttacaaaccatacaataatgaatatttactagagaccacaaaacctatggactatgagctacagcagttctatgaagtagctgtggtggcttggaactctgagggatttcatgtcaaaagggtcattaaagtgcaacttttagatgacaatgataatgctccaattttccttcaacccttaatagaactaaccatcgaagagaacaactcacccaatgcctttttgactaagctgtatgctacagatgccgacagcgaggagagaggccaagtttcatattttctgggacctgatgctccatcatatttttccttagacagtgtcacaggaattctgacagtttctactcagctggaccgagaagagaaagaaaagtacagatacactgtcagagctgttgactgtgggaagccacccagagaatcagtagccactgtggccctcacagtgttggataaaaatgacaacagtcctcggtttatcaacaaggacttcagcttttttgtgcctgaaaactttccaggctatggtgagattggagtaattagtgtaacagatgctgacgctggacgaaatggatgggtcgccctctctgtggtgaaccagagtgatatttttgtcatagatacaggaaagggtatgctgagggctaaagtctctttggacagagagcagcaaagctcctatactttgtgggttgaagctgttgatgggggtgagcctgccctctcctctacagcaaaaatcacaattctccttctagatatcaatgacaaccctcctcttgttttgtttcctcagtctaatatgtcttatctgttagtactgccttctactctgccaggctccccggttacagaagtctatgctgtcgacaaagacacaggcatgaatgctgtcatagcttacagcatcatagggagaagaggtcctaggcctgagtccttcaggattgaccctaaaactggcaacattactttggaagaggcattgctgcagacagattatgggctccatcgcttactggtgaaagtgagtgatcatggttatcccgagcctctccactccacagtcatggtgaacctatttgtcaatgacactgtcagtaatgagagttacattgagagtcttttaagaaaagaaccagagattaatatagaggagaaagaaccacaaatctcaatagaaccgactcataggaaggtagaactcgag

SEQ ID NO: 1048 - protein, 459 aa, Homo sapiens
GSPRYIANEIDGVVYLKELEPVNTPIALFTIRDPEGKYKVNCYLDGEGPFRLSPYKPYNNEYLLETTKPMDYELQQFYEVAVVAWNSEGFHVKRVIKVQLLDDNDNAPIFLQPLIELTIEENNSPNAFLTKLYATDADSEERGQVSYFLGPDAPSYFSLDSVTGILTVSTQLDREEKEKYRYTVRAVDCGKPPRESVATVALTVLDKNDNSPRFINKDFSFFVPENFPGYGEIGVISVTDADAGRNGWVALSVVNQSDIFVIDTGKGMLRAKVSLDREQQSSYTLWVEAVDGGEPALSSTAKITILLLDINDNPPLVLFPQSNMSYLLVLPSTLPGSPVTEVYAVDKDTGMNAVIAYSIIGRRGPRPESFRIDPKTGNITLEEALLQTDYGLHRLLVKVSDHGYPEPLHSTVMVNLFVNDTVSNESYIESLLRKEPEINIEEKEPQISIEPTHRKVELE

SEQ ID NO: 1049 - DNA, 1377 bp, Homo sapiens
  CDS (1)..(1377)
ggatcccctcgttacatagcaaacgagatagatggtgtggtttatctgaaagaactggaacccgttaacactcccattgcgtttttcaccataagagatccagaaggtaaatacaaggttaactgctacctggatggtgaagggccgtttaggttatcaccttacaaaccatacaataatgaatatttactagagaccacaaaacctatggactatgagctacagcagttctatgaagtagctgtggtggcttggaactctgagggatttcatgtcaaaagggtcattaaagtgcaacttttagatgacaatgataatgctccaattttccttcaacccttaatagaactaaccatcgaagagaacaactcacccaatgcctttttgactaagctgtatgctacagatgccgacagcgaggagagaggccaagtttcatattttctgggacctgatgctccatcatatttttccttagacagtgtcacaggaattctgacagtttctactcagctggaccgagaagagaaagaaaagtacagatacactgtcagagctgttgactgtgggaagccacccagagaatcagtagccactgtggccctcacagtgttggataaaaatgacaacagtcctcggtttatcaacaaggacttcagcttttttgtgcctgaaaactttccaggctatggtgagattggagtaattagtgtaacagatgctgacgctggacgaaatggatgggtcgccctctctgtggtgaaccagagtgatatttttgtcatagatacaggaaagggtatgctgagggctaaagtctctttggacagagagcagcaaagctcctatactttgtgggttgaagctgttgatgggggtgagcctgccctctcctctacagcaaaaatcacaattctccttctagatatcaatgacaaccctcctcttgttttgtttcctcagtctaatatgtcttatctgttagtactgccttctactctgccaggctccccggttacagaagtctatgctgtcgacaaagacacaggcatgaatgctgtcatagcttacagcatcatagggagaagaggtcctaggcctgagtccttcaggattgaccctaaaactggcaacattactttggaagaggcattgctgcagacagattatgggctccatcgcttactggtgaaagtgagtgatcatggttatcccgagcctctccactccacagtcatggtgaacctatttgtcaatgacactgtcagtaatgagagttacattgagagtcttttaagaaaagaaccagagattaatatagaggagaaagaaccacaaatctcaatagaaccgactcataggaaggtagaactcgag

SEQ ID NO: 1050 - protein, 459 aa, Homo sapiens
GSPRYIANEIDGVVYLKELEPVNTPIAFFTIRDPEGKYKVNCYLDGEGPFRLSPYKPYNNEYLLETTKPMDYELQQFYEVAVVAWNSEGFHVKRVIKVQLLDDNDNAPIFLQPLIELTIEENNSPNAFLTKLYATDADSEERGQVSYFLGPDAPSYFSLDSVTGILTVSTQLDREEKEKYRYTVRAVDCGKPPRESVATVALTVLDKNDNSPRFINKDFSFFVPENFPGYGEIGVISVTDADAGRNGWVALSVVNQSDIFVIDTGKGMLRAKVSLDREQQSSYTLWVEAVDGGEPALSSTAKITILLLDINDNPPLVLFPQSNMSYLLVLPSTLPGSPVTEVYAVDKDTGMNAVIAYSIIGRRGPRPESFRIDPKTGNITLEEALLQTDYGLHRLLVKVSDHGYPEPLHSTVMVNLFVNDTVSNESYIESLLRKEPEINIEEKEPQISIEPTHRKVELE

SEQ ID NO: 1051 - DNA, 576 bp, Homo sapiens
  CDS (7)..(570)
ggatccatctcggtgtgggtcccggaaaatgcacctgtaaacacccgactggccatagagcatcctgctgtggacccagatgtaggcattaatggggtacagacctatcgcttactggactaccatggtatgttcaccctggacgtggaggagaatgagaatggggagcgcaccccctacctaattgtcatgggtgctttggacagggaaacccaggaccagtatgtgagcatcatcatagctgaggatggtgggtctccaccacttttgggcagtgccactctcaccattggcatcagtgacattaatgacaattgccctctcttcacagactcacaaatcaatgtcactgtgtatgggaatgctacagtgggcaccccaattgcagctgtccaggctgtggataaagacttggggaccaatgctcaaattacttattcttacagtcagaaagttccacaagcatctaaggatttatttcacctggatgaaaacactggagtcattaaacttttcagtaagattggaggaagtgttctggagtcccacaagctcaccatccttgctaatctcgag

SEQ ID NO: 1052 - protein, 188 aa, Homo sapiens
ISVWVPENAPVNTRLAIEHPAVDPDVGINGVQTYRLLDYHGMFTLDVEENENGERTPYLIVMGALDRETQDQYVSIIIAEDGGSPPLLGSATLTIGISDINDNCPLFTDSQINVTVYGNATVGTPIAAVQAVDKDLGTNAQITYSYSQKVPQASKDLFHLDENTGVIKLFSKIGGSVLESHKLTILAN

SEQ ID NO: 1053 - DNA, 1012 bp, Homo sapiens
  CDS (23)..(1009)
agagaccaggttctgagaagcaatggtgacgaaggcctttgtcttgttggccatctttgcagaagcctctgcaaaatcgtgtgctccaaataaagcagatgtcattcttgtgttttgctatcccaaaaccatcatcaccaaaatccccgagtgtccctatggatgggaagttcatcagctggccctcggagggctgtgttacaatggggtccacgaaggaggttactaccaatttgtgatcccagatttatcacctaaaaacaagtcctattgtggaacccagtctgagtacaagccacctatctatcacttctacagtcacatcgtttccaatgacaccacagtgattgtaaaaaaccagcctgtcaactactccttctcctgcacctaccactccacctacttggtgaaccaggctgcctttgaccagagagtggccactgttcacgtgaagaacgggagcatgggcacatttgagagccaactgtctctcaacttctacactaatgccaagttctccatcaagaaagaagctccctttgtcctggaggcatcggaaatcggttcagatctgtttgcaggagtggaagccaaagggttaagcattaggtttaaagtggtcttgaacagctgttgggccaccccctcggctgacttcatgtatcccttgcagtggcagctgatcaacaagggctgccccacggatgaaaccgtcctcgtgcatgagaatgggagagatcacagggcaaccttccaattcaatgctttccggttccagaacatccccaaactctccaaggtgtggttacactgtgagacgttcatctgcgacagtgagaaactctcctgcccagtgacctgcgataaacggaagcgcctcctgcgagaccagaccgggggagtcctggtcgtggagctctccctgcggagcaggggattttccagtctctatagcttctcagatgttctccaccacctcatcatgatgttggggatttgtgccgtgttatag

SEQ ID NO: 1054 - protein, 329 aa, Homo sapiens
MVTKAFVLLAIFAEASAKSCAPNKADVILVFCYPKTIITKIPECPYGWEVHQLALGGLCYNGVHEGGYYQFVIPDLSPKNKSYCGTQSEYKPPIYHFYSHIVSNDTTVIVKNQPVNYSFSCTYHSTYLVNQAAFDQRVATVHVKNGSMGTFESQLSLNFYTNAKFSIKKEAPFVLEASEIGSDLFAGVEAKGLSIRFKVVLNSCWATPSADFMYPLQWQLINKGCPTDETVLVHENGRDHRATFQFNAFRFQNIPKLSKVWLHCETFICDSEKLSCPVTCDKRKRLLRDQTGGVLVVELSLRSRGFSSLYSFSDVLHHLIMMLGICAVL

SEQ ID NO: 1055 - DNA, 1026 bp, Homo sapiens
  CDS (85)..(984)
gatcgaggctcaggccctggaaggaccgtaaacatttggccagcttggtttggatacctggcagagaccaggttctgagaagcaatggtgacgaaggcctttgtcttgttggccatctttgcagaagcctctgcaaaatcgtgtgctccaaataaagcagatgtcattcttgtgttttgctatcccaaaaccatcatcaccaaaatccccgagtgtccctatggatgggaagttcatcagctggccctcggagggctgtgttacaatggggtccacgaaggaggttactaccaatttgtgatcccagatttatcacctaaaaacaagtcctattgtggaacccagtctgagtacaagccacctatctatcacttctacagtcacatcgtttccaatgacaccacagtgattgtaaaaaaccagcctgtcaactactccttctcctgcacctaccactccacctacttggtgaaccaggctgcctttgaccagagtgtcaatttccttccaaagaatgccaagttctccatcaagaaagaagctccctttgtcctggaggcatccgaaatcggttcagatctgtttgcaggagtggaagccaaagggttaagcattaggtttaaagtggtcttgaacagctgttgggccaccccctcggctgacttcatgtatcccttgcagtggcagctgatcaacaagggctgccccacggatgaaaccgtcctcgtgcatgagaatgggagagatcacagggcaaccttccaattcaatgctttccggttccagaacatccccaaactctccaaggtgtggttacactgtgagacgttcatctgcgacagtgagaaactctcctgcccagtgacctgcgataaacggaagcgcctcctgcgagaccagaccgggggagtcctggtcgtggagctctccctgcggaatgttctccaccacctcatcatgatgttggggatttgtgccgtgttataggagttagccaggcagctgccgctcctccacccacaatag

SEQ ID NO: 1056 - protein, 300 aa, Homo sapiens
MVTKAFVLLAIFAEASAKSCAPNKADVILVFCYPKTIITKIPECPYGWEVHQLALGGLCYNGVHEGGYYQFVIPDLSPKNKSYCGTQSEYKPPIYHFYSHIVSNDTTVIVKNQPVNYSFSCTYHSTYLVNQAAFDQSVNFLPKNAKFSIKKEAPFVLEASEIGSDLFAGVEAKGLSIRFKVVLNSCWATPSADFMYPLQWQLINKGCPTDETVLVHENGRDHRATFQFNAFRFQNIPKLSKVWLHCETFICDSEKLSCPVTCDKRKRLLRDQTGGVLVVELSLRNVLHHLIMMLGICAVL

SEQ ID NO: 1057 - DNA, 1012 bp, Homo sapiens
  CDS (23)..(1009)
agagaccaggttctgagaagcaatggtgacgaaggcctttgtcttgttggccatctttgcagaagcctctgcaaaatcgtgtgctccaaataaagcagatgtcattcttgtgttttgctatcccaaaaccatcatcaccaaaatccccgagtgtccctatggatgggaagttcatcagctggccctcggagggctgtgttacaatggggtccacgaaggaggttactaccaatttgtgatcccagatttatcacctaaaaacaagtcctattgtggaacccagtctgagtacaagccacctatctatcacttctacagtcacatcgtttccaatgacgccacagtgattgtaaaaaaccagcctgtcaactactccttctcctgcacctaccactccacctacttggtgaaccaggctgcctttgaccagagagtggccactgttcacgtgaagaacgggagcatgggcacatttgagagccaactgtctctcaacttctacactaatgccaagttctccatcaagaaagaagctccctttgtcctggaggcatccgaaatcggttcagatctgtttgcaggagtggaagccaaagggttaagcattaggtttaaagtggtcttgaacagctgttgggccaccccctcggctgacttcatgtatcccttgcagtggcagctgatcaacaagggctgccccacggatgaaaccgtcctcgtgcatgagaatgggagagatcacagggcaaccttccaattcaatgctttccggttccagaacatccccaaactctccaaggtgtggttacactgtgagacgttcatctgcgacagtgagaaactctcctgcccagtgacctgcgataaacggaagcgcctcctgcgagaccagaccgggggagtcctggtcgtggagctctccctgcggagcaggggattttccagtctctatagcttctcagatgttctccaccacctcatcatgatgttggggatttgtgccgtgttatag

SEQ ID NO: 1058 - protein, 329 aa, Homo sapiens
MVTKAFVLLAIFAEASAKSCAPNKADVILVFCYPKTIITKIPECPYGWEVHQLALGGLCYNGVHEGGYYQFVIPDLSPKNKSYCGTQSEYKPPIYHFYSHIVSNDATVIVKNQPVNYSFSCTYHSTYLVNQAAFDQRVATVHVKNGSMGTFESQLSLNFYTNAKFSIKKEAPFVLEASEIGSDLFAGVEAKGLSIRFKVVLNSCWATPSADFMYPLQWQLINKGCPTDETVLVHENGRDHRATFQFNAFRFQNIPKLSKVWLHCETFICDSEKLSCPVTCDKRKRLLRDQTGGVLVVELSLRSRGFSSLYSFSDVLHHLIMMLGICAVL

SEQ ID NO: 1059 - DNA, 840 bp, Homo sapiens
  CDS (7)..(834)
ggatccaaatcgtgtgctccaaataaagcagatgtcattcttgtgttttgctatcccaaaaccatcatcaccaaaatccccgagtgtccctatggatgggaagttcatcagctggccctcggagggctgtgttacaatggggtccacgaaggaggttactaccaatttgtgatcccagatttatcacctaaaaacaagtcctattgtggaacccagtctgagtacaagccacctatctatcacttctacagtcacatcgtttccaatgacaccacagtgattgtaaaaaaccagcctgtcaactactccttctcctgcacctaccactccacctacttggtgaaccaggctgcctttgaccagagagtggccactgttcacgtgaagaacgggagcatgggcacatttgagagccaactgtctctcaacttctacactaatgccaagttctccatcaagaaagaagctccctttgtcctggaggcatcggaaatcggttcagatctgtttgcaggagtggaagccaaagggttaagcattaggtttaaagtggtcttgaacagctgttgggccaccccctcggctgacttcatgtatcccttgcagtggcagctgatcaacaagggctgccccacggatgaaaccgtcctcgtgcatgagaatgggagagatcacagggcaaccttccaattcaatgctttccggttccagaacatccccaaactctccaaggtgtggttacactgtgagacgttcatctgcgacagtgagaaactctcctgcccagtgacctgcgataaacggaagcgcctcctgcgagaccagaccgggggactcgag

SEQ ID NO: 1060 - protein, 276 aa, Homo sapiens
KSCAPNKADVILVFCYPKTIITKIPECPYGWEVHQLALGGLCYNGVHEGGYYQFVIPDLSPKNKSYCGTQSEYKPPIYHFYSHIVSNDTTVIVKNQPVNYSFSCTYHSTYLVNQAAFDQRVATVHVKNGSMGTFESQLSLNFYTNAKFSIKKEAPFVLEASEIGSDLFAGVEAKGLSIRFKVVLNSCWATPSADFMYPLQWQLINKGCPTDETVLVHENGRDHRATFQFNAFRFQNIPKLSKVWLHCETFICDSEKLSCPVTCDKRKRLLRDQTGG

SEQ ID NO: 1061 - DNA, 821 bp, Homo sapiens
  CDS (1)..(819)
ggatccaaatcgtgcgctccaaataaagcagatgtcattcttgtgttttgctatcccaaaaccatcatcaccaaaatccccgagtgtccctatggatgggaagttcatcagctggccctcggagggctgtgttacaatggggtccacgaaggaggttactaccaatttgtgatcccagatttatcacctaaaaacaagtcctattgtggaacccagtctgagtacaagccacctatctatcacttctacagtcacatcgtttccaatgacaccacagtgattgtaaaaaaccagcctgtcaactactccttctcctgcacctaccactccacctacttggtgaaccaggctgcctttgaccagagagtggccactgttcacgtgaagaacgggagcatgggcacatttgagagccaactgtctctcaacttctacactaatgccaagttctccatcaagaaagaagctccctttgtcctggaggcatccgaaatcggttcagatctgtttgcaggagtggaagccaaagggttaagcattaggtttaaagtggtcttgaacagctgttgggccaccccctcggctgacttcatgtatcccttgcagtggcagctgatcaacaagggctgccccacggatgaaaccgtcctcgtgcatgagaatgggagagatcacagggcaaccttccaattcaatgctttccggttccagaacatccccaaactctccaaggtgtggttacactgtgagacgttcatctgcgacagtgagaaactctcctgcccagtgacctgcgataaacggaagcgcctcctgcgaga

SEQ ID NO: 1062 - protein, 273 aa, Homo sapiens
GSKSCAPNKADVILVFCYPKTIITKIPECPYGWEVHQLALGGLCYNGVHEGGYYQFVIPDLSPKNKSYCGTQSEYKPPIYHFYSHIVSNDTTVIVKNQPVNYSFSCTYHSTYLVNQAAFDQRVATVHVKNGSMGTFESQLSLNFYTNAKFSIKKEAPFVLEASEIGSDLFAGVEAKGLSIRFKVVLNSCWATPSADFMYPLQWQLINKGCPTDETVLVHENGRDHRATFQFNAFRFQNIPKLSKVWLHCETFICDSEKLSCPVTCDKRKRLLR

SEQ ID NO: 1063 - DNA, 1933 bp, Homo sapiens
  CDS (75)..(1880)
ggtcggctgccccgagggctttgagctggactcccagggagcgttttgtgtgggtgagcgcccccaaccctggcatggatgtgggaggcctctcagcctgggatggatggcttctcccagccagctggcaggagggcctgggagcggagaccaccagaccccttcctgccccagacagggacgagtgctcaggaggccctagcccctgctcccatgcctgccttaatgcacccggccgcttctcctgcacctgccccactggcttcgccctggcctgggatgacaggaactgcagagatgtggacgagtgtgcgtgggatgctcacctctgccgagagggacagcgctgtgtgaacctgctcgggtcctaccgctgcctccccgactgtgggcctggcttccgggtggctgatggggccggctgtgaagatgtggacgaatgcctggaggggttggacgactgtcactacaaccagctctgcgagaacaccccaggcggtcaccgctgcagctgccccaggggttaccggatgcagggccccagcctgccctgcctagatgtcaatgagtgcctgcagctgcccaaggcctgcgcctaccagtgccacaacctccagggcagctaccgctgcctgtgccccccaggccagaccctccttcgcgacggcaaggcctgcacctcactggagcggaatggacaaaatgtgaccaccgtcagccaccgaggccctctattgccctggctgcggccctgggcctcgatccccggtacctcctaccacgcctgggtctctctccgtccgggtcccatggccctgagcagtgtgggccgggcctggtgccctcctggtttcatcaggcagaacggagtctgcacagaccttgacgagtgccgcgtgaggaacctgtgtcagcacgcctgccgcaacactgagggcagctaccagtgcctgtgcccacgccggctaccgtctgctccccagcgggaagaactgccaggacatcaacgagtgcgaggaggagagcatcgagtgtggacccggccagatgtgcttcaacacccgtggcagctaccagtgtgtggacacaccctgtcctgccacctaccggcagggccccagccctgggacgtgcttccggcgctgctcgcaggactgcggcacgggcggcccctctacgctgcagtaccggctgctgccgctgcccctgggcgtgcgcgcccaccacgacgtggcccgcctcaccgccttctccgaggtcggcgtccccgccaaccgcaccgagctcagcatgctggagcccgacccccgcagccccttcgcgctgcgtccgctgcgcgcgggccttggcgcggtctacacccgtcgcgcgctcacccgcgccggcctctaccggctcaccgtgcgtgctgcggcaccgcgccaccaaagcgtcttcgtcttgctcatcgccgtgtccccctacccctactaaacgggagagggcattggcggccgccctggcgtgacccccgaggaaggggtcgaggagaagcttggtccacgccacctgctgtggcaagcggagcgtcatcgtctcccgccccgtgcgtcagcgagaccttgggtcaacacgaccctgcgcacagccttgacccccgacagcgaggacctgacctcacagagggaggcgtccagggcggcccttgggtggccagtcccgcaggcagggcccggggaagcccggatcagacctccaggtctgatccgcccctcagtgggagcgggacagggacacagggcacctggacgcgcgggagagggggcagaccccgcgttaggggtggcagcagctgtcgcccggccacacctggtggtgtcattctgaaccctgttgcaatataaagggatttttttttaaccaacttggtttctttgtctaattattttgcttt

SEQ ID NO: 1064 - protein, 602 aa, Homo sapiens
MDVGGLSAWDGWLLPASWQEGLGAETTRPLPAPDRDECSGGPSPCSHACLNAPGRFSCTCPTGFALAWDDRNCRDVDECAWDAHLCREGQRCVNLLGSYRCLPDCGPGFRVADGAGCEDVDECLEGLDDCHYNQLCENTPGGHRCSCPRGYRMQGPSLPCLDVNECLQLPKACAYQCHNLQGSYRCLCPPGQTLLRDGKACTSLERNGQNVTTVSHRGPLLPWLRPWASIPGTSYHAWVSLRPGPMALSSVGRAWCPPGFIRQNGVCTDLDECRVRNLCQHACRNTEGSYQCLCPRRLPSAPQREELPGHQRVRGGEHRVWTRPDVLQHPWQLPVCGHTLSCHLPAGPQPWDVLPALLAGLRHGRPLYAAVPAAAAAPGRARPPRRGPPHRLLRGRRPRQPHRAQHAGARPPQPLRAASAARGPWRGLHPSRAHPRRPLPAHRACCGTAPPKRLRLAHRRVPLPLLNGRGHWRPPWRDPRGRGRGEAWSTPPAVASGASSSPAPCVSETLGQHDPAHSLDPRQRGPDLTEGGVQGGPWVASPAGRARGSPDQTSRSDPPLSGSGTGTQGTWTRGRGGRPRVRGGSSCRPATPGGVILNPVAI

SEQ ID NO: 1065 - DNA, 3373 bp, Homo sapiens
  CDS (1)..(3189)
ttgattgtccaagccacagataaagggatgcccaggctttctaatacgactgtaatcaaggtacaggtgactgatataaatgacaatgccccagcttttctcccctctgaagcagtggaaattacagaagtcatgactatttcagaagattctttgcctggtgtaattgtgactcatgtgtcagttcatgatgtggatttgaattcagctttcatattcagttttgccaaagagagtaatcctggaaccaagtttgctattgatcagaacactggagtggtggtgttggtgaaaacattggattttgaagaaatgactgaatatgagctgctcatccaaatttctgattcagtgcactacacagagggagcacttgtagtccgtgtgctggatgtcaatgataatccaccagtgttttctcaagatttctatcaggtcacagttcctgaatcaatacctgtggggtattcagtgctgactctgtcagccacagacttagaaagcaatgagaacatttcttacagaattctatcctcttctaaggaattctccattgatcctaagaatggcacaatatttactatcagtcccgtattacttctggatacaatatcaacaactcgatttcttgtggaagccagtgatggtggaaatcctgacccgagagctcttactttagtggagataggaatagaagatatgaacaattatgcccctgaattcacagtcaaatcctataatcttagcctaagtgaggatgctctggttggaagcacgcttgttacattttcaaacatcgaccatgactggacccgtgaaaacacatatgttgaatattccatcatcagtggtaattcacagaacaattttcatgtggaaactaagttctttcattcagaatatccttataagcaagtcggttatcttgtgttgcttcacagtctggacagagaagcaagtgctagccatgagcttgtcattctggcatctgacagtggctgccctccattgagttccacagctgtcatatcaatacaagtacttgatgtcaatgacaatcccccaaacttcagcagcctgagctatcacacccatgtcaaggaaagcacccctctagggagtcacatcactgtggtctcagcaaatgaccgtgacacagggtcacatgcagaaatcatctacaacatcatctctggaaatgagaagggacatttttacttagaagaaaacactggagttctttatttgattaaacctctggattatgaaaaaatgacaaaattcaccttaactgtccaagcttcagatgcagaaaagaaacatttttcttttgcagttgtgtttgtcagtgtcctggatgataacgaccatgcacctcagtttatgttctcaagcttcagctgtattgttccagaaaatctgcctatttcctctaccatatgctctataaatgctctggattttgatgctggtccgtatggagaattgacctattctattgtatcaccctgttttctcactcatggaatgtcttatgatcatgatctcttcctcattgaccctttgacaggggatattcatgctaagcaaatccttgactatgaaaatggcaataaatactgcctcacagtccaagccaaagacaaaggtgatgcaactgcctccttagtggtctgggtggatattgaagggatagatgaatttgagcccattttcactcaagatcagtattttttcaccctcccagaaaagaataaagacagacagttgattggcagagtggaagcctcagatgcagatgctggtattgatggagtcattctttactcccttggaacctcatctcctttcttttcagtaaatagaaccaatggaaatatttatttgattagagcccttcccctaataaaaagtcaactcaacaaagaagacaccttggaaatgaaaataatcgctcatagtcccaaatcagattccaagtttgcatcttgcactgtttttgtgaatgtgtctttctcctctgaaggaacacccttggcagtgttcgccagcagcttttcaatcagcctggtggtctcctttttagtgtttctgatactcatctgcattctaattgtaatgattttaagacataaacaaaaagacacaataaacaattatgaggagaagaaaacctcatctttagatgcggacttgagagtgacccgggatgccagtgtgctcaaagccttccagaaaactgacgactgcagtaacgaggtggtccctgtggatgccactccggaatggttgagtttaataagtatcatggagaaggatattgtcaatctgtacagatactcaaactccagtggccactgttctgtggaaggagaaactgcagaagataaggaaatccagaggataaatgagcatccctacagaaagtgctcagactcagctctgagtgaccacgagtccagggtgccagactcgggtatcccgagggactcagaccagctctcctgcctatctggggaaactgatgtgatggtgactgccgaaacagcagaagccagccaaacatttggggaaggagatcaaggggaaggctgcagcaccacctgtgctcaaaataatgtgttaccccagacagttcagaagagagaggcaaaagagagcatcctggctgacgttagaaaagagtctgtctttatttcaggtgatcaggaagtaaggtgtgcagctctttcaactcagacgacctctgatcatgatggaaaagacaactatcactggaattatcttcttagttgggagcccaaattccaacctcttgcctcagtatttaatgatattgcaaaactaaaggatgaacatttgcatatgcctggcattccaaaagagaagaaatcttttgtttttccaccccctttgataacagcagtagcccagcctgggattaaagcagtcccaccaagaatgccggcagtaaacctggggcaggtgcctccgaaacacccacgctctcccatcccctaccatcttggttctctgccagaaggcatgactcccaatttttctccatctctttccctattgacgatgcagcctcctgccttgtctccactgttgagagaaggagaattattaggaacacacatcagtggtacatgccatgaacttaaagcagaagatgaagttcaaatatgaaaccactgggatgccaagtacctgctcaccattggtcatgaatgaatgaacaaaatgttttcaagccggcaactcgagattgggctcatttttatctaaaagcaagtgatgtaatttagttagagtttttaaaacttccccattaaagtttctccaatttcaaaaaaaaaaaaaaaaaaaa

SEQ ID NO: 1066 - protein, 1063 aa, Homo sapiens
LIVQATDKGMPRLSNTTVIKVQVTDINDNAPAFLPSEAVEITEVMTISEDSLPGVIVTHVSVHDVDLNSAFIFSFAKESNPGTKFAIDQNTGVVVLVKTLDFEEMTEYELLIQISDSVHYTEGALVVRVLDVNDNPPVFSQDFYQVTVPESIPVGYSVLTLSATDLESNENISYRILSSSKEFSIDPKNGTIFTISPVLLLDTISTTRFLVEASDGGNPDPRALTLVEIGIEDMNNYAPEFTVKSYNLSLSEDALVGSTLVTFSNIDHDWTRENTYVEYSIISGNSQNNFHVETKFFHSEYPYKQVGYLVLLHSLDREASASHELVILASDSGCPPLSSTAVISIQVLDVNDNPPNFSSLSYHTHVKESTPLGSHITVVSANDRDTGSHAEIIYNIISGNEKGHFYLEENTGVLYLIKPLDYEKMTKFTLTVQASDAEKKHFSFAVVFVSVLDDNDHAPQFMFSSFSCIVPENLPISSTICSINALDFDAGPYGELTYSIVSPCFLTHGMSYDHDLFLIDPLTGDIHAKQILDYENGNKYCLTVQAKDKGDATASLVVWVDIEGIDEFEPIFTQDQYFFTLPEKNKDRQLIGRVEASDADAGIDGVILYSLGTSSPFFSVNRTNGNIYLIRALPLIKSQLNKEDTLEMKIIAHSPKSDSKFASCTVFVNVSFSSEGTPLAVFASSFSISLVVSFLVFLILICILIVMILRHKQKDTINNYEEKKTSSLDADLRVTRDASVLKAFQKTDDCSNEVVPVDATPEWLSLISIMEKDIVNLYRYSNSSGHCSVEGETAEDKEIQRINEHPYRKCSDSALSDHESRVPDSGIPRDSDQLSCLSGETDVMVTAETAEASQTFGEGDQGEGCSTTCAQNNVLPQTVQKREAKESILADVRKESVFISGDQEVRCAALSTQTTSDHDGKDNYHWNYLLSWEPKFQPLASVFNDIAKLKDEHLHMPGIPKEKKSFVFPPPLITAVAQPGIKAVPPRMPAVNLGQVPPKHPRSPIPYHLGSLPEGMTPNFSPSLSLLTMQPPALSPLLREGELLGTHISGTCHELKAEDEVQI

SEQ ID NO: 1067 - DNA, 3075 bp, Homo sapiens
  CDS (1)..(3075)
ggatccgaagtcatgactatttcagaagattctttgcctggtgtaattgtgactcatgtgtcagttcatgatgtggatttgaattcagctttcatattcagttttgccaaagagagtaatcctggaaccaagtttgctattgatcagaacactggagtggtggtgttggtgaaaacattggattttgaagaaatgactgaatatgagctgctcatccaaatttctgattcagtgcactacacagagggagcacttgtagtccgtgtgctggatgtcaatgataatccaccagtgttttctcaagatttctatcaggtcacagttcctgaatcaatacctgtggggtattcagtgctgactctgtcagccacagacttagaaagcaatgagaacatttcttacagaattctatcctcttctaaggaattctccattgatcctaagaatggcacaatatttactatcagtcccgtattacttctggatacaatatcaacaactcaatttcttgtggaagccagtgatggtggaaatcctgacctgagagctcttactttagtggagataggaatagaagatatgaacaattatgcccctgaattcacagtcaaatcctataatcttagcctaagtgaggatgctctggttggaagcacgcttgttacattttcaaacatcgaccatgactggacccgtgaaaacacatatgttgaatattccatcatcagtggtaattcacagaacaattttcatgtggaaactaagttctttcattcagaatatccttataagcaggtcggttatcttgtgttgcttcacagtctggacagagaagcaagtgctagccatgagcttgtcattctggcatctgacagtggctgccctccattgagttccacagctgtcatatcaatacaagtacttgatgtcaatgacaatcccccaaacttcagcagcctgagctatcacacccatgtcaaggaaagcacccctctagggagtcacatcactgtggtctcagcaaatgaccgtgacacagggtcacatgcagaaatcatctacaacatcatctctggaaatgagaagggacatttttacttagaagaaaacactggagttctttatttgattaaacctctggattatgaaaaaatgacaaaattcaccttaactgtccaagcttcagatgcagaaaagaaacatttttcttttgcagttgtgtttgtcagtgtcctggatgataacgaccatgcacctcagtttatgttctcaagcttcagctgtattgttccagaaaatctgcctatttcctctaccatacgctctataaatgctctggattttgatgctggtccgtatggagaattgacctattctattgtatcaccctgttttctcactcatggaatgtcttatgatcatgatctcttcctcattgaccctttgacaggggatattcatgctaagcaaatccttgactatgaaaatggcaataaatactgcctcacagtccaagccaaagacaaaggtgatgcaactgcctccttagtggtctgggtggatattgaagggatagatgaatttgagcccattttcactcaagatcagtattttttcaccctcccagaaaagaataaagacagacagttgattggcagagtggaagcctcagatgcagatgctggtattgatggagtcattctttactcccttggaacctcatctcctttcttttcagtaaataaaaccaatggaaatatttatttgattagagcccttcccctaataaaaagtcaactcaacaaagaagacaccttggaaatgaaaataatcgctcatagtcccaaatcagattccaagtttgcatcttgcactgtttttgtgaatgtgtctttctcctctgaaggaacacccttggcagtgttcgccagcagcttttcaatcagcctggtggtctcctttttagtgtttctgatactcatctgcattctaattgtaatgattttaagacataaacaaaaagacacaataaacaattatgaggagaagaaaacctcatctttagatgcggacttgagagtgacccgggatgccagtgtgctcaaagccttccagaaaactgacgactgcagtaacgaggtggtccctgtggatgccactccggaatggttgagtttaataagtatcatggagaaggatattgtcaatctgtacagacactcaaactccagtggccactgttctgtggaaggagaaactgcagaagataaggaaatccagaggataaatgagcatccctacagaaagtgctcagactcagctctgagtgaccacgagtccagggtgccagactcgggtatcccgagggactcagaccagctctcctgcctatctggggaaactgatgtgatggtgactgccgaaacagcagaagccagccaaacatttggggaaggagatcaaggggaaggctgcagcaccacctgtgctcaaaataatgtgttaccccagacagttcagaagagagaggcaaaagagagcatcctggctgatgttagaaaagagtctgtctttatttcaggtgatcaggaagtaaggtgtgcagctctttcaactcagacgacctctgatcatgatggaaaggacaactatcactggaattatcttcttagttgggagcccaaattccaacctcttgcctcagtatttaatgatattgcaaaactaaaggatgaacatttgcatatgcctggcattccaaaagagaagaaatcttttgtttttccaccccctttgataacagcagtagcccagcctgggattaaagcagtcccaccaagaatgccggcagtaaacctggggcaggtgcctccgaaacacccacgctctcccatcccctaccatcttggttctctgccagaaggcatgactcccaatttttctccatctctttccctattgacgatgcagcctcctgccttgtctccactgttgagagaaggagaattattaggaacacacatcagtggtacatgccatgaacttaaagcagaagatgaagttcaaatagtcgac

SEQ ID NO: 1068 - protein, 1025 aa, Homo sapiens
GSEVMTISEDSLPGVIVTHVSVHDVDLNSAFIFSFAKESNPGTKFAIDQNTGVVVLVKTLDFEEMTEYELLIQISDSVHYTEGALVVRVLDVNDNPPVFSQDFYQVTVPESIPVGYSVLTLSATDLESNENISYRILSSSKEFSIDPKNGTIFTISPVLLLDTISTTQFLVEASDGGNPDLRALTLVEIGIEDMNNYAPEFTVKSYNLSLSEDALVGSTLVTFSNIDHDWTRENTYVEYSIISGNSQNNFHVETKFFHSEYPYKQVGYLVLLHSLDREASASHELVILASDSGCPPLSSTAVISIQVLDVNDNPPNFSSLSYHTHVKESTPLGSHITVVSANDRDTGSHAEIIYNIISGNEKGHFYLEENTGVLYLIKPLDYEKMTKFTLTVQASDAEKKHFSFAVVFVSVLDDNDHAPQFMFSSFSCIVPENLPISSTIRSINALDFDAGPYGELTYSIVSPCFLTHGMSYDHDLFLIDPLTGDIHAKQILDYENGNKYCLTVQAKDKGDATASLVVWVDIEGIDEFEPIFTQDQYFFTLPEKNKDRQLIGRVEASDADAGIDGVILYSLGTSSPFFSVNKTNGNIYLIRALPLIKSQLNKEDTLEMKIIAHSPKSDSKFASCTVFVNVSFSSEGTPLAVFASSFSISLVVSFLVFLILICILIVMILRHKQKDTINNYEEKKTSSLDADLRVTRDASVLKAFQKTDDCSNEVVPVDATPEWLSLISIMEKDIVNLYRHSNSSGHCSVEGETAEDKEIQRINEHPYRKCSDSALSDHESRVPDSGIPRDSDQLSCLSGETDVMVTAETAEASQTFGEGDQGEGCSTTCAQNNVLPQTVQKREAKESILADVRKESVFISGDQEVRCAALSTQTTSDHDGKDNYHWNYLLSWEPKFQPLASVFNDIAKLKDEHLHMPGIPKEKKSFVFPPPLITAVAQPGIKAVPPRMPAVNLGQVPPKHPRSPIPYHLGSLPEGMTPNFSPSLSLLTMQPPALSPLLREGELLGTHISGTCHELKAEDEVQIVD

SEQ ID NO: 1069 - DNA, 3075 bp, Homo sapiens
  CDS (1)..(3075)
ggatccgaagtcatgactatttcagaagattctttgcctggtgtaattgtgactcatgtgtcagttcatgatgtggatttgaattcagctttcatattcagttttgccaaagagagtaatcctggaaccaagtttgctattgatcagaacactggagtggtggtgttggtgaaaacattggattttgaagaaatgactgaatatgagctgctcatccaaatttctgattcagtgcactacacagagggagcacttgtagtccgtgtgctggatgtcaatgataatccaccagtgttttctcaagatttctatcaggtcacagttcctgaatcaatacctgtggggtattcagtgctgactctgtcagccacagacttagaaagcaatgagaacatttcttacagaattctatcctcttctaaggaattctccattgatcctaagaatggcacaatatttactatcagccccgtattacttctggatacaatatcaacaactcaatttcttgtggaagccagtgatggtggaaatcccgacctgagagctcttactttagtggagataggaatagaagatatgaacaattatgcccctgaattcacagtcaaatcctataatcttagcctaagtgaggatgctctggttggaagcacgcttgttacattttcaaacatcgaccatgactggacccgtgaaaacacatatgttgaatattccatcatcagtggtaattcacagaacaattttcatgtggaaactaagttctttcattcagaatatccttataagcaagtcggttatcttgtgttgcttcacagtctggacagagaagcaagtgctagccatgagcttgtcattctggcatctgacagtggctgccctccattgagttccacagctgtcatatcaatacaagtacttgatgtcaatgacaatcccccaaacttcagcagcctgagctatcacacccatgtcaaggaaagcacccctctagggagtcacatcactgtggtctcagcaaatgaccgtgacacagggtcacatgcagaaatcatctacaacatcatctctggaaatgagaagggacatttttacttagaagaaaacactggagttctttatttgattaaacctctggattatgaaaaaatgacaaaattcaccttaactgtccaagcttcagatgcagaaaagaaacatttttcttttgcagttgtgtttgtcagtgtcctggatgataacgaccatgcacctcagtttatgttctcaagcttcagctgtattgttccagaaaatctgcctatttcctctaccatatgctctataaatgctctggattttgatgctggtccgtatggagaattgacctattctattgtatcaccctgttttctcactcatggaatgtcttatgatcatgatctcttcctcattgaccctttgacaggggatattcatgctaagcaaatccttgactatgaaaatggcaataaatactgcctcacagtccaagccaaagacaaaggtgatgcaactgcctccttagtggtctgggtggatattgaagggatagatgaatttgagcccattttcactcaagatcagtattttttcaccctcccagaaaagaataaagacagacagttgattggcagagtggaagcctcagatgcagatgctggtattgatggagtcattctttactcccttggaacctcatctcctttcttttcagtaaataaaaccaatggaaatatttatttgattagagcccttcccctaataaaaagtcaactcaacaaagaagacaccttggaaatgaaaataatcgctcatagtcccaaatcagattccaagtttgcatcttgcactgtttttgtgaatgtgtctttctcctctgaaggaacacccttggcagtgttcgccagcagcttttcaatcagcctggtggtctcctttttagtgtttctgatactcatctgcattctaattgtaatgattttaagacataaacaaaaagacacaataaacaattatgaggagaagaaaacctcatctttagatgcggacttgagagtgacccgggatgccagtgtgctcaaagccttccagaaaactgacgactgcagtaacgaggtggtccctgtggatgccactccggaatggttgagtttaataagtatcatggagaaggatattgtcaatctgtacagacactcaaactccagtggccactgttctgtggaaggagaaactgcagaagataaggaaatccagaggataaatgagcatccctacagaaagtgctcagactcagctctgagtgaccacgagtccagggtgccagactcgggtatcccgagggactcagaccagctctcctgcctatctggggaaactgatgtgatggtgactgccgaaacagcagaagccagccaaacatttggggaaggagatcaaggggaaggctgcagcaccacctgtgctcaaaataatgtgttaccccagacagttcagaagagagaggcaaaagagagcatcctggctgatgttagaaaagagtctgtctttatttcaggtgatcaggaagtaaggtgtgcagctctttcaactcagacgacctctgatcatgatggaaaagacaactatcactggaattatcttcttagttgggagcccaaattccaacctcttgcctcagtatttaatgatattgcaaaactaaaggatgaacatttgcatatgcctggcattccaaaagagaagaaatcttttgtttttccaccccctttgataacagcagtagcccagcctgggattaaagcagtcccaccaagaatgccggcagtaaacctggggcaggtgcctccgaaacacccacgctctcccatcccctaccatcttggttctctgccagaaggcatgactcccaatttttctccatctctttccctattgacgatgcagcctcctgccttgtctccactgttgagagaaggagaattattaggaacacacatcagtggtacatgccatgaacttaaagcagaagatgaagttcaaatagtcgac

SEQ ID NO: 1070 - protein, 1025 aa, Homo sapiens
GSEVMTISEDSLPGVIVTHVSVHDVDLNSAFIFSFAKESNPGTKFAIDQNTGVVVLVKTLDFEEMTEYELLIQISDSVHYTEGALVVRVLDVNDNPPVFSQDFYQVTVPESIPVGYSVLTLSATDLESNENISYRILSSSKEFSIDPKNGTIFTISPVLLLDTISTTQFLVEASDGGNPDLRALTLVEIGIEDMNNYAPEFTVKSYNLSLSEDALVGSTLVTFSNIDHDWTRENTYVEYSIISGNSQNNFHVETKFFHSEYPYKQVGYLVLLHSLDREASASHELVILASDSGCPPLSSTAVISIQVLDVNDNPPNFSSLSYHTHVKESTPLGSHITVVSANDRDTGSHAEIIYNIISGNEKGHFYLEENTGVLYLIKPLDYEKMTKFTLTVQASDAEKKHFSFAVVFVSVLDDNDHAPQFMFSSFSCIVPENLPISSTICSINALDFDAGPYGELTYSIVSPCFLTHGMSYDHDLFLIDPLTGDIHAKQILDYENGNKYCLTVQAKDKGDATASLVVWVDIEGIDEFEPIFTQDQYFFTLPEKNKDRQLIGRVEASDADAGIDGVILYSLGTSSPFFSVNKTNGNIYLIRALPLIKSQLNKEDTLEMKIIAHSPKSDSKFASCTVFVNVSFSSEGTPLAVFASSFSISLVVSFLVFLILICILIVMILRHKQKDTINNYEEKKTSSLDADLRVTRDASVLKAFQKTDDCSNEVVPVDATPEWLSLISIMEKDIVNLYRHSNSSGHCSVEGETAEDKEIQRINEHPYRKCSDSALSDHESRVPDSGIPRDSDQLSCLSGETDVMVTAETAEASQTFGEGDQGEGCSTTCAQNNVLPQTVQKREAKESILADVRKESVFISGDQEVRCAALSTQTTSDHDGKDNYHWNYLLSWEPKFQPLASVFNDIAKLKDEHLHMPGIPKEKKSFVFPPPLITAVAQPGIKAVPPRMPAVNLGQVPPKHPRSPIPYHLGSLPEGMTPNFSPSLSLLTMQPPALSPLLREGELLGTHISGTCHELKAEDEVQIVD

SEQ ID NO: 1071 - DNA, 1899 bp, Homo sapiens
  CDS (1)..(1899)
ggatccgaagtcatgactatttcagaagattctttgcctggtgtaattgtgactcatgtgtcagttcatgatgtggatttgaattcagctttcatattcagttttgccaaagagagtaatcctggaaccaagtttgctattgatcagaacactggagtggtggtgttggtgaaaacattggattttgaagaaatgactgaatatgagctgctcatccaaatttctgattcagtgcactacacagagggagcacttgtagtccgtgtgctggatgtcaatgataatccaccagtgttttctcaagatttctatcaggtcacagttcctgaatcaatacctgtggggtattcagtgctgactctgtcagccacagacttagaaagcaatgagaacatttcttacagaattctatcctcttctaaggaattctccattgatcctaagaatggcacaatatttactatcagtcccgtattacttctggatacaatatcaacaactcaatttcttgtggaagccagtgatggtggaaatcctgacctgagagctcttactttagtggagataggaatagaagatatgaacaattatgcccctgaattcacagtcaaatcctataatcttagcctaagtgaggatgctctggttggaagcacgcttgttacattttcaaacatcgaccatgactggacccgtgaaaacacatatgttgaatattccatcatcagtggtaattcacagaacaattttcatgtggaaactaagttctttcattcagaatatccttataagcaagtcggttatcttgtgttgcttcacagtctggacagagaagcaagtgctagccatgagcttgtcattctggcatctgacagtggctgccctccattgagttccacagctgtcatatcaatacaagtacttgatgtcaatgacaatcccccaaacttcagcagcctgagctatcacacccatgtcaaggaaagcacccctctagggagtcacatcactgtggtctcagcaaatgaccgtgacacagggtcacatgcagaaatcatctacaacatcatctctggaaatgagaagggacatttttacttagaagaaaacactggagttctttatttgattaaacctctggattatgaaaaaatgacaaaattcaccttaactgtccaagcttcagatgcagaaaagaaacatttttcttttgcagttgtgtttgtcagtgtcctggatgataacgaccatgcacctcagtttatgttctcaagcttcagctgtattgttccagaaaatctgcctatttcctctaccatatgctctataaatgctctggattttgatgctggtccgtatggagaattgacctattctattgtatcaccctgttttctcactcatggaatgtcttatgatcatgatctcttcctcattgaccctttgacaggggatattcatgctaagcaaatccttgactatgaaaatggcaataaatactgcctcacagtccaagccaaagacaaaggtgatgcaactgcctccttagtggtctgggtggatattgaagggatagatgaatttgagcccattttcactcaagatcagtattttttcaccctcccagaaaagaataaagacagacagttgattggcagagtggaagcctcagatgcagatgctggtattgatggagtcattctttactcccttggaacctcatctcctttcttttcagtaaataaaaccaatggaaatatttatttgattagagcccttcccctaataaaaagtcaactcaacaaagaagacaccttggaaatgaaaataatcgctcatagtcccaaatcagattccaagtttgcatcttgcactgtttttgtgaatgtgtctgtcgac

SEQ ID NO: 1072 - protein, 633 aa, Homo sapiens
GSEVMTISEDSLPGVIVTHVSVHDVDLNSAFIFSFAKESNPGTKFAIDQNTGVVVLVKTLDFEEMTEYELLIQISDSVHYTEGALVVRVLDVNDNPPVFSQDFYQVTVPESIPVGYSVLTLSATDLESNENISYRILSSSKEFSIDPKNGTIFTISPVLLLDTISTTQFLVEASDGGNPDLRALTLVEIGIEDMNNYAPEFTVKSYNLSLSEDALVGSTLVTFSNIDHDWTRENTYVEYSIISGNSQNNFHVETKFFHSEYPYKQVGYLVLLHSLDREASASHELVILASDSGCPPLSSTAVISIQVLDVNDNPPNFSSLSYHTHVKESTPLGSHITVVSANDRDTGSHAEIIYNIISGNEKGHFYLEENTGVLYLIKPLDYEKMTKFTLTVQASDAEKKHFSFAVVFVSVLDDNDHAPQFMFSSFSCIVPENLPISSTICSINALDFDAGPYGELTYSIVSPCFLTHGMSYDHDLFLIDPLTGDIHAKQILDYENGNKYCLTVQAKDKGDATASLVVWVDIEGIDEFEPIFTQDQYFFTLPEKNKDRQLIGRVEASDADAGIDGVILYSLGTSSPFFSVNKTNGNIYLIRALPLIKSQLNKEDTLEMKIIAHSPKSDSKFASCTVFVNVSVD

SEQ ID NO: 1073 - DNA, 2956 bp, Homo sapiens
  CDS (57)..(2933)
ctattgatcagaacactggagtggtggtgttggtgaaaacattggattttgaagaaatgactgaatatgagctgctcatccaaatttctgattcagtgcactacacagagggagcacttgtagtccgtgtgctggatgtcaatgataatccaccagtgttttctcaagatttctatcaggtcacagttcctgaatcaatacctgtggggtattcagtgctgactctgtcagccacagacttagaaagcaatgagaacatttcttacagaattctatcctcttctaaggaattctccattgatcctaagaatggcacaatatttactatcagtcccgtattacttctggatacaatatcaacaactcaatttcttgtggaagccagtgatggtggaaatcctgacctgagagctcttactttagtggagataggaatagaagatatgaacaattatgcccctgaattcacagtcaaatcctataatcttagcctaagtgaggatgctctggttggaagcacgcttgttacattttcaaacatcgaccatgactggacccgtgaaaacacatatgttgaatattccatcatcagtggtaattcacagaacaattttcatgtggaaactaagttctttcattcagaatatccttataagcaagtcggttatcttgtgttgcttcacagtctggacagagaagcaagtgctagccatgagcttgtcattctggcatctgacagtggctgccctccattgagttccacagctgtcatatcaatacaagtacttgatgtcaatgacaatcccccaaacttcagcagcctgagctatcacacccatgtcaaggaaagcacccctctagggagtcacatcactgtggtctcagcaaatgaccgtgacacagggtcacatgcagaaatcatctacaacatcatctctggaaatgagaagggacatttttacttagaagaaaacactggagttctttatttgattaaacctctggattatgaaaaaatgacaaaattcaccttaactgtccaagcttcagatgcagaaaagaaacatttttcttttgcagttgtgtttgtcagtgtcctggatgataacgaccatgcacctcagtttatgttctcaagcttcagctgtattgttccagaaaatctgcctatttcctctaccatatgctctataaatgctctggattttgatgctggtccgtatggagaattgacctattctattgtatcaccctgttttctcactcatggaatgtcttatgatcatgatctcttcctcattgaccctttgacaggggatattcatgctaagcaaatccttgactatgaaaatggcaataaatactgcctcacagtccaagccaaagacaaaggtgatgcaactgcctccttagtggtctgggtggatattgaagggatagatgaatttgagcccattttcactcaagatcagtattttttcaccctcccagaaaagaataaagacagacagttgattggcagagtggaagcctcagatgcagatgctggtattgatggagtcattctttactcccttggaacctcatctccttccctttcagtaaataaaaccaatggaaatatttatttgattagagcccttcccctaataaaaagtcaactcaacaaagaagacaccttggaaatgaaaataatcgctcatagtcccaaatcagattccaagtttgcatcttgcactgtttttgtgaatgtgtctttctcctctgaaggaacacccttggcagtgttcgccagcagcttttcaatcagcctggtggtctcctttttagtgtttctgatactcatctgcattctaattgtaatgattttaagacataaacaaaaagacacaataaacaattatgaggagaagaaaacctcatctttagatgcggacttgagagtgacccgggatgccagtgtgctcaaagccttccagaaaactgacgactgcagtaacgaggtggtccctgtggatgccactccggaatggttgagtttaataagtatcatggagaaggatattgtcaatctgtacagacactcaaactccagtggccactgttctgtggaaggagaaactgcagaagataaggaaatccagaggataaatgagcatccctacagaaagtgctcagactcagctctgagtgaccacgagtccagggtgccagactcgggtatcccgagggactcagaccagctctcctgcctatctggggaaactgatgtgatggtgactgccgaaacagcagaagccagccaaacatttggggaaggagatcaaggggaaggctgcagcaccacctgtgctcaaaataatgtgttaccccagacagttcagaagagagaggcaaaagagagcatcctggctgatgttagaaaagagtctgtctttatttcaggtgatcaggaagtaaggtgtgcagctctttcaactcagacgacctctgatcatgatggaaaagacaactatcactggaattatcttcttagttgggagcccaaattccaacctcttgcctcagtatttaatgatattgcaaaactaaaggatgaacatttgcatatgcctggcattccaaaagagaagaaatcttttgtttttccaccccctttgataacagcagtagcccagcctgggattaaagcagtcccaccaagaatgccggcagtaaacctggggcaggtgcctccgaaacacccacgctctcccatcccctaccatcttggttctctgccagaaggcatgactcccaatttttctccatctctttccctattgacgatgcagcctcctgccttgtctccactgttgagagaaggagaattattaggaacacacatcagtggtacatgccatgaacttaaagcagaagatgaagttcaaatatgaaaccactgggatgccaagta

SEQ ID NO: 1074 - protein, 959 aa, Homo sapiens
MTEYELLIQISDSVHYTEGALVVRVLDVNDNPPVFSQDFYQVTVPESIPVGYSVLTLSATDLESNENISYRILSSSKEFSIDPKNGTIFTISPVLLLDTISTTQFLVEASDGGNPDLRALTLVEIGIEDMNNYAPEFTVKSYNLSLSEDALVGSTLVTFSNIDHDWTRENTYVEYSIISGNSQNNFHVETKFFHSEYPYKQVGYLVLLHSLDREASASHELVILASDSGCPPLSSTAVISIQVLDVNDNPPNFSSLSYHTHVKESTPLGSHITVVSANDRDTGSHAEIIYNIISGNEKGHFYLEENTGVLYLIKPLDYEKMTKFTLTVQASDAEKKHFSFAVVFVSVLDDNDHAPQFMFSSFSCIVPENLPISSTICSINALDFDAGPYGELTYSIVSPCFLTHGMSYDHDLFLIDPLTGDIHAKQILDYENGNKYCLTVQAKDKGDATASLVVWVDIEGIDEFEPIFTQDQYFFTLPEKNKDRQLIGRVEASDADAGIDGVILYSLGTSSPSLSVNKTNGNIYLIRALPLIKSQLNKEDTLEMKIIAHSPKSDSKFASCTVFVNVSFSSEGTPLAVFASSFSISLVVSFLVFLILICILIVMILRHKQKDTINNYEEKKTSSLDADLRVTRDASVLKAFQKTDDCSNEVVPVDATPEWLSLISIMEKDIVNLYRHSNSSGHCSVEGETAEDKEIQRINEHPYRKCSDSALSDHESRVPDSGIPRDSDQLSCLSGETDVMVTAETAEASQTFGEGDQGEGCSTTCAQNNVLPQTVQKREAKESILADVRKESVFISGDQEVRCAALSTQTTSDHDGKDNYHWNYLLSWEPKFQPLASVFNDIAKLKDEHLHMPGIPKEKKSFVFPPPLITAVAQPGIKAVPPRMPAVNLGQVPPKHPRSPIPYHLGSLPEGMTPNFSPSLSLLTMQPPALSPLLREGELLGTHISGTCHELKAEDEVQI

SEQ ID NO: 1075 - DNA, 3075 bp, Homo sapiens; identical to SEQ ID NO: 1069
  CDS (7)..(3069)

SEQ ID NO: 1076 - protein, 1021 aa, Homo sapiens
EVMTISEDSLPGVIVTHVSVHDVDLNSAFIFSFAKESNPGTKFAIDQNTGVVVLVKTLDFEEMTEYELLIQISDSVHYTEGALVVRVLDVNDNPPVFSQDFYQVTVPESIPVGYSVLTLSATDLESNENISYRILSSSKEFSIDPKNGTIFTISPVLLLDTISTTQFLVEASDGGNPDLRALTLVEIGIEDMNNYAPEFTVKSYNLSLSEDALVGSTLVTFSNIDHDWTRENTYVEYSIISGNSQNNFHVETKFFHSEYPYKQVGYLVLLHSLDREASASHELVILASDSGCPPLSSTAVISIQVLDVNDNPPNFSSLSYHTHVKESTPLGSHITVVSANDRDTGSHAEIIYNIISGNEKGHFYLEENTGVLYLIKPLDYEKMTKFTLTVQASDAEKKHFSFAVVFVSVLDDNDHAPQFMFSSFSCIVPENLPISSTICSINALDFDAGPYGELTYSIVSPCFLTHGMSYDHDLFLIDPLTGDIHAKQILDYENGNKYCLTVQAKDKGDATASLVVWVDIEGIDEFEPIFTQDQYFFTLPEKNKDRQLIGRVEASDADAGIDGVILYSLGTSSPFFSVNKTNGNIYLIRALPLIKSQLNKEDTLEMKIIAHSPKSDSKFASCTVFVNVSFSSEGTPLAVFASSFSISLVVSFLVFLILICILIVMILRHKQKDTINNYEEKKTSSLDADLRVTRDASVLKAFQKTDDCSNEVVPVDATPEWLSLISIMEKDIVNLYRHSNSSGHCSVEGETAEDKEIQRINEHPYRKCSDSALSDHESRVPDSGIPRDSDQLSCLSGETDVMVTAETAEASQTFGEGDQGEGCSTTCAQNNVLPQTVQKREAKESILADVRKESVFISGDQEVRCAALSTQTTSDHDGKDNYHWNYLLSWEPKFQPLASVFNDIAKLKDEHLHMPGIPKEKKSFVFPPPLITAVAQPGIKAVPPRMPAVNLGQVPPKHPRSPIPYHLGSLPEGMTPNFSPSLSLLTMQPPALSPLLREGELLGTHISGTCHELKAEDEVQI

SEQ ID NO: 1077 - DNA, 1899 bp, Homo sapiens; identical to SEQ ID NO: 1071
  CDS (1)..(1899)

SEQ ID NO: 1078 - protein, 633 aa, Homo sapiens; identical to SEQ ID NO: 1072

SEQ ID NO: 1079 - DNA, 9193 bp, Homo sapiens
  CDS (1)..(9009)
atggagaaatgtgggcttaaagaggaaggcagttacgcggacatagatccagttgcccacgatccggacgccggactgttcagcactcagggctacaccctggtgcaaccgtccgacctgcccaaggaccccgcaggcccgttcttccagttgcgctaccggactccggggccactaccgtcaccgcttttgccaggctcctcgtcacccctggagcctctagatctggtgctgctgcggcgcttggaccgagaggaggcggcggcgcaccggctgcagatcgaggcatgggacggcggccgaccccggcgcaccggcctcctgagcgtggagctgcgcgtgctggatgagaacgacaacccgccggtctttgagcaggacgagtaccgcgccgcggtgcgcgaggacgcccagccgggcgccgaggtctgtcgcgtgcgcgccaccgaccgcgacctggggcccaatggcttcgtgcgctacagcgtccgcgcccggcaagtgcctggggcgggtagcggcggcggggcactgggcgacgcggcctacttcgcggtggaggagctgagcggcgtggtgcgagtgtggagacctctggaccgcgaggcacaggcctggcaccagttggtggtggaggcccgcgatggaggcgccgagcctgaggttgccacggtgcgcgtgtccatcgccgtgctggacgtgaatgacaaccggccagcaattcacgtgctctttctcacagagggaggcgtcgcccgtgtctctgaaggcgcccgaccgggcgactacgtggctcgcgtctcggtgtctgacgcggacggggtaataggcaaaattacagctattgacatggactctggaaagaatggacagctattatatttccttttgtctgatggaaaattcttcaagatgaatcctaatacaggagagttaatcaattgggtggcactggatcgtgagcaccgggggcaccatgagatgactgtgctagtgacagaccgcggctccccaccacgaaacgccaccatggcggtttacgtctcagttactgacatcaatgataacaggcccttcttcccccagtgtctccctggaaaggagttacacgtgaaggttctggaaggtcaaccagtaaatatgttggttacaactgtgtttgcaaaggatcctgatgaaggaaataatgcagaagttacatactcagtatcttcagaagatagttctgatcactttaagattgacgccaacaatggtgaaataagaacaaccacaatactttcgtatgattatagaccttcctacagaatgagtgtcattgccactgaccagggagtgcctcctcttcaaggacaggcagttgttaatattcaggaacttgattatgagacgacatctcattatcttttcagagtgattactacagaccatagcaaaaacctttccctgagtagcacagtcttccttagtatcgatgtggaagatcagaatgaccattccccatctttccaggatgagctcattgtgatcagtgtagaggagaatgttcccataggaaccctggtgtatgtcttcaatgccaaagatgatgacggcagttttttgaacagtagaatacaatactacattgaatcccacaaccctggcacgaatccatttctcatccacccctcatttggcacactagtcactgtgtcccgtcttgacagagaaagcattccaactgtcatcctgacagtaacagcatctgatcaggctgtgaatgtgacagaccggcgactgagatcactgacagcacaaatagtgattttggatgtaaatgaccacaaccccacttttatttctttccccaatgcccatgtcaaagaggatgtcacagtgggctccttggtccaccacataactgctcacgatccagacgaaggaaggaatggaaaagtaacatacagcatcctctcaggaaatgaaaacatgacgtttatgctagatgagtcatcaggcttactaaccacaacctgtcctttggattatgaaatgaaaactcagcatattctgactgttctggcactggatgatggcacaccagcactttcttcatcccagactttgacagttactgttcttgatgtaaatgatgaagctccagtatttaagcagcacctgtatgaagcctcagtgaaagaaaaccaaaatccaggggagtttgttaccagggttgaagctctggacagagattcagtgttccttaatactagagagcttaacatgtgttttctagcattctacgatgcagtttttaaaaatggtgggctaagtgcccaagcctttgttcgtgtggacctggaggacgtgaatgataatcatcctgtgtttaacccatcaacctatgtgacgagcatcagtgatgagacccagccaggcaccgagatcatcaatgttcttgccactgaccaggactctgggatatatgggacagtggcttatgagcttattccaggaaacgtgtcgtccctttttaccattgactccaccacaggaattatttacttaacattacctcttagtcatttggaatctaccacactttcgttgatggtctctgctcaagacggtggtgggctcacagctgtcattaatgccgatgtcaccatacacattttccagacaactctggcacctgctgagtttgaaaggcctaagtacactttcttagtttatgaagatgtgcctgaagatagtcccattggaacagtgaaagcaagagagcccttgaatccacctaggagctctgtaatacacctgcaagttagagttttggatgccaatgaccacagtccttcttttcccacactttattaccagtcctctgtgagagaagatgctgaagtgggaacagtggttcttgtgctttcagctgtggacaaggatgaaggcctgaatgggcaaactgagtattttctgactgatgaggcttgtggtgcattcaccattgatcctatgtcaggcacattgaaaaccagcaacaccctcgaccgtgaagccagatctcagcatacatttagtgctgtggccagagactgtagcatccagggttcacgaagcaccactgtaattataaaagtatatgtcactgatgttaatgacaatgatccagttttggaacagaacccttttgatgtgtttctttcccccgagtcgcctacaaaccagacaactgtcattgtgagagctgatgacctggacttggggcccaatggaactgtggactccgatgactccccgctgctggacgacttccacgtgcacccggacaccggcatcatccgcactgcgcggcgcctggaccgcgagcggcgggaccactacagcttcgtcgccgccacgctgctgggcgctgtggtgcaggtggagattcgcgtcaacgacgtgaatgaccactcgccccgctttcccctcgactccctgcaactcgacgtctccgagctcagcccgccagggaccgccttccgcctgccagttgcccacgatccggacgccggactgttcagcactcagggctacaccctggtgcaaccgtccgacctgcccaaggaccccgcaggcccgttcttccagttgcgctaccggactccggggccactaccgtcaccgcttttgccaggctcctcgtcacccctggagcctctagatctggtgctgctgcggcgcttggaccgagaggaggcggcggcgcaccggctgcagatcgaggcatgggacggcggccgaccccggcgcaccggcctcctgagcgtggagctgcgcgtgctggatgagaacgacaacccgccggtctttgagcaggacgagtcccgcgccgcggtgcgagagcacgcccagccgggcgccgaggtctgtcgcgtgcgcgccaccgcccgcgacgtggggcccaatggcttcgtgcgctacagcgtccgcgcccggcaagtgcctggggcgggtagcggcggcggggcactgggcgacgcggcctacttcgcgttggtggtggaggcccgcgatggaggcgccgagcatgaggttgccgcggtgcgtgtgtccatcgccgtgctggacgtgaatgacaaccggccagcaattcacgtgctctttctcacagagggaggtgtcgcccgtgtctctgaaggcgcccgcccgggcgactacgtggctcgcgtctcggtgtctgacgcgggcggtgactgggagaaggaagatgaggccacaggggagcttggtgtgacagcctctgatgcagattcaggactctatggctttattgaatattctctttatgatggattcctgagctatgaagcacctcaggcattccggatcgaccctcatgatgggcaaatctgtgtttctcaagatatcgacagggaaagggatccagctacctatgatctcctggtggaagctaaggatgggtttgaaatcatgccaggtgcttcatttgaattattcgagataaattctgacactggagaggtagtgacaaccaccatacttgacagagaaattcaagaagtcttcacccttcgagtactagtacgagatgggggattcccttcattgtccagcaccacaacaatcctctgcactgttgaagatgaaaacgatcacgcaccagagtttattgtttccagttatgacattgaggttctggaaaaccaggaaccagaggttgtctatacggttttagcctctgatatggatgctggcaataacagagctgttgaatatcacataattgactcctcagaaccaatcttttacaggatttcttctggtgatctcggcggaaagttctccattcacccgcggctgggcactattcgcacccggaagcccctggatcacgagacgcagcccgtggttgtgctcacggtgcaggcgcagctcggcagcgccccagcctgcagcagcaccgaggtcaacataacagtcatggatgtcaatgacaaccacccagcgttcctcaggacctcggatgagattagaatatcccagaccacgccccctggcacagccttgtacctcgcacgtgcggaagacagagacagtgggcggaacggactcatccggtactccatcgccagcccgcagccaggcgtctttgccatcgacagagccctgggggtgctgttcctcaacggcagcctgggcgcgggcgagcagcgggagctcacgctgactctcagggccgaggaccaaggcgtgcatcctcaggcagccctgctggtgctgacagtcgttatcgagaaacgcgaacacagcccatcctggactttcgaacatttggtctatcaagtggaagtcagtacttctattgtgactgttaaagcttttgctcctgactcaattcaggacagcatgaaatattcaatttttagtggaaatgaagatggagttctttccctgtgctctaagtcaggtgtggtgaactgccttgcttctctcagtcacacagactttctctccctgaaatttgaatcttcggtgaagggacaccaagacagagacaaattacagccaattcatcttgatgacaacaactcaaagaagctgtgctttacattccctagagccactcaggctcttgtattcactgggcactgtctttctgatacatctctccccggttgggtttttgctaccgacttggacagtggtttgaacggcctgattgagtattctattctgtctggcaaccaagaagaagcattccagattgatgcactgagtggtgtgataacaacaaaagcgattctagattacgagctcaccagctcctacagcttgattgtccaagccacagataaagggatgcccaggctttctaatacgactgtaatcaaggtacaggtgactgatataaatgacaatgccccagcttttctcccctctgaagcagtggaaattacagaagtcatgactatttcagaagattctttgcctggtgtaattgtgactcatgtgtcagttcatgatgtggatttgaattcagctttcatattcagttttgccaaagagagtaatcctggaaccaagtttgctattgatcagaacactggagtggtggtgttggtgaaaacattggattttgaagaaatgactgaatatgagctgctcatccaaatttctgattcagtgcactacacagagggagcacttgtagtccgtgtgctggatgtcaatgataatccaccagtgttttctcaagatttctatcaggtcacagttcctgaatcaatacctgtggggtattcagtgctgactctgtcagccacagacttagaaagcaatgagaacatttcttacagaattctatcctcttctaaggaattctccattgatcctaagaatggcacaatatttactatcagtcccgtattacttctggatacaatatcaacaactcgatttcttgtggaagccagtgatggtggaaatcctgacccgagagctcttactttagtggagataggaatagaagatatgaacaattatgcccctgaattcacagtcaaatcctataatcttagcctaagtgaggatgctctggttggaagcacgcttgttacattttcaaacatcgaccatgactggacccgtgaaaacacatatgttgaatattccatcatcagtggtaattcacagaacaattttcatgtggaaactaagttctttcattcagaatatccttataagcaagtcggttatcttgtgttgcttcacagtctggacagagaagcaagtgctagccatgagcttgtcattctggcatctgacagtggctgccctccattgagttccacagctgtcatatcaatacaagtacttgatgtcaatgacaatcccccaaacttcagcagcctgagctatcacacccatgtcaaggaaagcacccctctagggagtcacatcactgtggtctcagcaaatgaccgtgacacagggtcacatgcagaaatcatctacaacatcatctctggaaatgagaagggacatttttacttagaagaaaacactggagttctttatttgattaaacctctggattatgaaaaaatgacaaaattcaccttaactgtccaagcttcagatgcagaaaagaaacatttttcttttgcagttgtgtttgtcagtgtcctggatgataacgaccatgcacctcagtttatgttctcaagcttcagctgtattgttccagaaaatctgcctatttcctctaccatatgctctataaatgctctggattttgatgctggtccgtatggagaattgacctattctattgtatcaccctgttttctcactcatggaatgtcttatgatcatgatctcttcctcattgaccctttgacaggggatattcatgctaagcaaatccttgactatgaaaatggcaataaatactgcctcacagtccaagccaaagacaaaggtgatgcaactgcctccttagtggtctgggtggatattgaagggatagatgaatttgagcccattttcactcaagatcagtattttttcaccctcccagaaaagaataaagacagacagttgattggcagagtggaagcctcagatgcagatgctggtattgatggagtcattctttactcccttggaacctcatctcctttcttttcagtaaatagaaccaatggaaatatttatttgattagagcccttcccctaataaaaagtcaactcaacaaagaagacaccttggaaatgaaaataatcgctcatagtcccaaatcagattccaagtttgcatcttgcactgtttttgtgaatgtgtctttctcctctgaaggaacacccttggcagtgttcgccagcagcttttcaatcagcctggtggtctcctttttagtgtttctgatactcatctgcattctaattgtaatgattttaagacataaacaaaaagacacaataaacaattatgaggagaagaaaacctcatctttagatgcggacttgagagtgacccgggatgccagtgtgctcaaagccttccagaaaactgacgactgcagtaacgaggtggtccctgtggatgccactccggaatggttgagtttaataagtatcatggagaaggatattgtcaatctgtacagatactcaaactccagtggccactgttctgtggaaggagaaactgcagaagataaggaaatccagaggataaatgagcatccctacagaaagtgctcagactcagctctgagtgaccacgagtccagggtgccagactcgggtatcccgagggactcagaccagctctcctgcctatctggggaaactgatgtgatggtgactgccgaaacagcagaagccagccaaacatttggggaaggagatcaaggggaaggctgcagcaccacctgtgctcaaaataatgtgttaccccagacagttcagaagagagaggcaaaagagagcatcctggctgacgttagaaaagagtctgtctttatttcaggtgatcaggaagtaaggtgtgcagctctttcaactcagacgacctctgatcatgatggaaaagacaactatcactggaattatcttcttagttgggagcccaaattccaacctcttgcctcagtatttaatgatattgcaaaactaaaggatgaacatttgcatatgcctggcattccaaaagagaagaaatcttttgtttttccaccccctttgataacagcagtagcccagcctgggattaaagcagtcccaccaagaatgccggcagtaaacctggggcaggtgcctccgaaacacccacgctctcccatcccctaccatcttggttctctgccagaaggcatgactcccaatttttctccatctctttccctattgacgatgcagcctcctgccttgtctccactgttgagagaaggagaattattaggaacacacatcagtggtacatgccatgaacttaaagcagaagatgaagttcaaatatgaaaccactgggatgccaagtacctgctcaccattggtcatgaatgaatgaacaaaatgttttcaagccggcaactcgagattgggctcatttttatctaaaagcaagtgatgtaatttagttagagtttttaaaacttccccattaaagtttctccaatttcaaaaaaaaaaaaaaaaaaaa

SEQ ID NO: 1080 - protein, 3003 aa, Homo sapiens
MEKCGLKEEGSYADIDPVAHDPDAGLFSTQGYTLVQPSDLPKDPAGPFFQLRYRTPGPLPSPLLPGSSSPLEPLDLVLLRRLDREEAAAHRLQIEAWDGGRPRRTGLLSVELRVLDENDNPPVFEQDEYRAAVREDAQPGAEVCRVRATDRDLGPNGFVRYSVRARQVPGAGSGGGALGDAAYFAVEELSGVVRVWRPLDREAQAWHQLVVEARDGGAEPEVATVRVSIAVLDVNDNRPAIHVLFLTEGGVARVSEGARPGDYVARVSVSDADGVIGKITAIDMDSGKNGQLLYFLLSDGKFFKMNPNTGELINWVALDREHRGHHEMTVLVTDRGSPPRNATMAVYVSVTDINDNRPFFPQCLPGKELHVKVLEGQPVNMLVTTVFAKDPDEGNNAEVTYSVSSEDSSDHFKIDANNGEIRTTTILSYDYRPSYRMSVIATDQGVPPLQGQAVVNIQELDYETTSHYLFRVITTDHSKNLSLSSTVFLSIDVEDQNDHSPSFQDELIVISVEENVPIGTLVYVFNAKDDDGSFLNSRIQYYIESHNPGTNPFLIHPSFGTLVTVSRLDRESIPTVILTVTASDQAVNVTDRRLRSLTAQIVILDVNDHNPTFISFPNAHVKEDVTVGSLVHHITAHDPDEGRNGKVTYSILSGNENMTFMLDESSGLLTTTCPLDYEMKTQHILTVLALDDGTPALSSSQTLTVTVLDVNDEAPVFKQHLYEASVKENQNPGEFVTRVEALDRDSVFLNTRELNMCFLAFYDAVFKNGGLSAQAFVRVDLEDVNDNHPVFNPSTYVTSISDETQPGTEIINVLATDQDSGIYGTVAYELIPGNVSSLFTIDSTTGIIYLTLPLSHLESTTLSLMVSAQDGGGLTAVINADVTIHIFQTTLAPAEFERPKYTFLVYEDVPEDSPIGTVKAREPLNPPRSSVIHLQVRVLDANDHSPSFPTLYYQSSVREDAEVGTVVLVLSAVDKDEGLNGQTEYFLTDEACGAFTIDPMSGTLKTSNTLDREARSQHTFSAVARDCSIQGSRSTTVIIKVYVTDVNDNDPVLEQNPFDVFLSPESPTNQTTVIVRADDLDLGPNGTVDSDDSPLLDDFHVHPDTGIIRTARRLDRERRDHYSFVAATLLGAVVQVEIRVNDVNDHSPRFPLDSLQLDVSELSPPGTAFRLPVAHDPDAGLFSTQGYTLVQPSDLPKDPAGPFFQLRYRTPGPLPSPLLPGSSSPLEPLDLVLLRRLDREEAAAHRLQIEAWDGGRPRRTGLLSVELRVLDENDNPPVFEQDESRAAVREHAQPGAEVCRVRATARDVGPNGFVRYSVRARQVPGAGSGGGALGDAAYFALVVEARDGGAEHEVAAVRVSIAVLDVNDNRPAIHVLFLTEGGVARVSEGARPGDYVARVSVSDAGGDWEKEDEATGELGVTASDADSGLYGFIEYSLYDGFLSYEAPQAFRIDPHDGQICVSQDIDRERDPATYDLLVEAKDGFEIMPGASFELFEINSDTGEVVTTTILDREIQEVFTLRVLVRDGGFPSLSSTTTILCTVEDENDHAPEFIVSSYDIEVLENQEPEVVYTVLASDMDAGNNRAVEYHIIDSSEPIFYRISSGDLGGKFSIHPRLGTIRTRKPLDHETQPVVVLTVQAQLGSAPACSSTEVNITVMDVNDNHPAFLRTSDEIRISQTTPPGTALYLARAEDRDSGRNGLIRYSIASPQPGVFAIDRALGVLFLNGSLGAGEQRELTLTLRAEDQGVHPQAALLVLTVVIEKREHSPSWTFEHLVYQVEVSTSIVTVKAFAPDSIQDSMKYSIFSGNEDGVLSLCSKSGVVNCLASLSHTDFLSLKFESSVKGHQDRDKLQPIHLDDNNSKKLCFTFPRATQALVFTGHCLSDTSLPGWVFATDLDSGLNGLIEYSILSGNQEEAFQIDALSGVITTKAILDYELTSSYSLIVQATDKGMPRLSNTTVIKVQVTDINDNAPAFLPSEAVEITEVMTISEDSLPGVIVTHVSVHDVDLNSAFIFSFAKESNPGTKFAIDQNTGVVVLVKTLDFEEMTEYELLIQISDSVHYTEGALVVRVLDVNDNPPVFSQDFYQVTVPESIPVGYSVLTLSATDLESNENISYRILSSSKEFSIDPKNGTIFTISPVLLLDTISTTRFLVEASDGGNPDPRALTLVEIGIEDMNNYAPEFTVKSYNLSLSEDALVGSTLVTFSNIDHDWTRENTYVEYSIISGNSQNNFHVETKFFHSEYPYKQVGYLVLLHSLDREASASHELVILASDSGCPPLSSTAVISIQVLDVNDNPPNFSSLSYHTHVKESTPLGSHITVVSANDRDTGSHAEIIYNIISGNEKGHFYLEENTGVLYLIKPLDYEKMTKFTLTVQASDAEKKHFSFAVVFVSVLDDNDHAPQFMFSSFSCIVPENLPISSTICSINALDFDAGPYGELTYSIVSPCFLTHGMSYDHDLFLIDPLTGDIHAKQILDYENGNKYCLTVQAKDKGDATASLVVWVDIEGIDEFEPIFTQDQYFFTLPEKNKDRQLIGRVEASDADAGIDGVILYSLGTSSPFFSVNRTNGNIYLIRALPLIKSQLNKEDTLEMKIIAHSPKSDSKFASCTVFVNVSFSSEGTPLAVFASSFSISLVVSFLVFLILICILIVMILRHKQKDTINNYEEKKTSSLDADLRVTRDASVLKAFQKTDDCSNEVVPVDATPEWLSLISIMEKDIVNLYRYSNSSGHCSVEGETAEDKEIQRINEHPYRKCSDSALSDHESRVPDSGIPRDSDQLSCLSGETDVMVTAETAEASQTFGEGDQGEGCSTTCAQNNVLPQTVQKREAKESILADVRKESVFISGDQEVRCAALSTQTTSDHDGKDNYHWNYLLSWEPKFQPLASVFNDIAKLKDEHLHMPGIPKEKKSFVFPPPLITAVAQPGIKAVPPRMPAVNLGQVPPKHPRSPIPYHLGSLPEGMTPNFSPSLSLLTMQPPALSPLLREGELLGTHISGTCHELKAEDEVQI

SEQ ID NO: 1081 - DNA, 10267 bp, Homo sapiens
  CDS (1)..(10083)
atggagaaatgtgggcttaaagaggaaggcagttacgcggacatagatccagttgcccacgatccggacgccggactgttcagcactcagggctacaccctggtgcaaccgtccgacctgcccaaggaccccgcaggcccgttcttccagttgcgctaccggactccggggccactaccgtcaccgcttttgccaggctcctcgtcacccctggagcctctagatctggtgctgctgcggcgcttggaccgagaggaggcggcggcgcaccggctgcagatcgaggcatgggacggcggccgaccccggcgcaccggcctcctgagcgtggagctgcgcgtgctggatgagaacgacaacccgccggtctttgagcaggacgagtaccgcgccgcggtgcgcgaggacgcccagccgggcgccgaggtctgtcgcgtgcgcgccaccgaccgcgacctggggcccaatggcttcgtgcgctacagcgtccgcgcccggcaagtgcctggggcgggtagcggcggcggggcactgggcgacgcggcctacttcgcggtggaggagctgagcggcgtggtgcgagtgtggagacctctggaccgcgaggcacaggcctggcaccagttggtggtggaggcccgcgatggaggcgccgagcctgaggttgccacggtgcgcgtgtccatcgccgtgctggacgtgaatgacaaccggccagcaattcacgtgctctttctcacagagggaggcgtcgcccgtgtctctgaaggcgcccgaccgggcgactacgtggctcgcgtctcggtgtctgacgcggacggtgactgggagaaggaagatgaggccacaggggagcttggtgtgggtcttggagacgggagcatctctctgtccttggaaggcggagagggagacttcgcgttgctacccggcggccccccaggggtatttttcctttgcgtggaggggcccctggacagagagagccgcgatctgtatgagttactactggtggccacggacgcggggtccccgccgctgagcacggaggagacgctgctactccgggtcgctgacctcaatgaccaaccacctctcttcagccaacagcattacaaggcctcagtgtccgaggccgcggcccctggcactgtagtcatgtgggtcagcgcctccgatgccgacgaggcaggcagtgatcacgcctggctgcgctacactgtagtccaactctcggctccctgcaatctcggctccctgcaatcaaagatggtccacaccgcagagtgtggaccatcttttgccattgattccgaaagcggtgcgatcagcactatccggactctagaccgagaggtccaggaggcggtggagctgaaagtggtggcccaggacctcggagagcccccactctctgccacctgcctggtgagcatcaccgtagatgatgtgaatgacaatgagcccatcttctggaggcaggtgtacaatgccaccattgcagagcatgccccggttggacactgctttctgcagcttatatctgctcaagttgcctctgtcaaaatcaaacacaaacacaaggagatacacgagaaacacaatcttgcctatatttcctgtccagcaggcaccatctatgtcataacctgggcagatggtgctgctgcctttagtgggacagactttgcattcagttctgatgaacttcaagcctttgttctcaagtctctgttctgtgaattaggagaaggagagttaatcaattgggtggcactggatcgtgagcaccgggggcaccatgagatgactgtgctagtgacagaccgcggctccccaccacgaaacgccaccatggcggtttacgtctcagttactgacatcaatgataacaggcccttcttcccccagtgtctccctggaaaggagttacacgtgaaggttctggaaggtcaaccagtaaatatgttggttacaactgtgtttgcaaaggatcctgatgaaggaaataatgcagaagttacatactcagtatcttcagaagatagttctgatcactttaagattgacgccaacaatggtgaaataagaacaaccacaatactttcgtatgattatagaccttcctacagaatgagtgtcattgccactgaccagggagtgcctcctcttcaaggacaggcagttgttaatattcaggtgatcccactatccaaagggagagcaatcatgtctcagaatattagacatttaattataccagaaaatttgaagcccacaaaaataatgagcttgataaagtcatctgatcaccttcaacaacattataatggaaagttacattttagtattgttgcagatgataaggatggacactttgaaatagacagctcaaccggagacttgtttctttctaaggaacttgattatgagacgacatctcattatcttttcagagtgattactacagaccatagcaaaaacctttccctgagtagcacagtcttccttagtatcgatgtggaagatcagaatgaccattccccatctttccaggatgagctcattgtgatcagtgtagaggagaatgttcccataggaaccctggtgtatgtcttcaatgccaaagatgatgacggcagttttttgaacagtagaatacaatactacattgaatcccacaaccctggcacgaatccatttctcatccacccctcatttggcacactagtcactgtgtcccgtcttgacagagaaagcattccaactgtcatcctgacagtaacagcatctgatcaggctgtgaatgtgacagaccggcgactgagatcactgacagcacaaatagtgattttggatgtaaatgaccacaaccccacttttatttctttccccaatgcccatgtcaaagaggatgtcacagtgggctccttggtccaccacataactgctcacgatccagacgaaggaaggaatggaaaagtaacatacagcatcctctcaggaaatgaaaacatgacgtttatgctagatgagtcatcaggcttactaaccacaacctgtcctttggattatgaaatgaaaactcagcatattctgactgttctggcactggatgatggcacaccagcactttcttcatcccagactttgacagttactgttcttgatgtaaatgatgaagctccagtatttaagcagcacctgtatgaagcctcagtgaaagaaaaccaaaatccaggggagtttgttaccagggttgaagctctggacagagattcaggtatgaggctgaatggagatccagacagggagctgtgtgcaggagggaaccctcttggaagcagggcccctcctggaagcaggacccctcctgaaggtgggctaagtgcccaagcctttgttcgtgtggacctggaggacgtgaatgataatcatcctgtgtttaacccatcaacctatgtgacgagcatcagtgatgagacccagccaggcaccgagatcatcaatgttcttgccactgaccaggactctgggatatatgggacagtggcttatgagcttattccaggaaacgtgtcgtccctttttaccattgactccaccacaggaattatttacttaacattacctcttagtcatttggaatctaccacactttcgttgatggtctctgctcaagacggtggtgggctcacagctgtcattaatgccgatgtcaccatacacattttccagacaactctggcacctgctgagtttgaaaggcctaagtacactttcttagtttatgaagatgtgcctgaagatagtcccattggaacagtgaaagcaagagagcccttgaatccacctaggagctctgtaatacacctgcaagttagagttttggatgccaatgaccacagtccttcttttcccacactttattaccagtcctctgtgagagaagatgctgaagtgggaacagtggttcttgtgctttcagctgtggacaaggatgaaggcctgaatgggcaaactgagtattttctgactgatgaggcttgtggtgcattcaccattgatcctatgtcaggcacattgaaaaccagcaacaccctcgaccgtgaagccagatctcagcatacatttagtgctgtggccagagactgtagcatccagggttcacgaagcaccactgtaattataaaagtatatgtcactgatgttaatgacaatgatccagttttggaacagaacccttttgatgtgtttctttcccccgagtcgcctacaaaccagacaactgtcattgtgagagctgatgacctggacttggggcccaatggaactgtggactccgatgactccccgctgctggacgacttccacgtgcacccggacaccggcatcatccgcactgcgcggcgcctggaccgcgagcggcgggaccactacagcttcgtcgccgccacgctgctgggcgctgtggtgcaggtggagattcgcgtcaacgacgtgaatgaccactcgccccgctttcccctcgactccctgcaactcgacgtctccgagctcagcccgccagggaccgccttccgcctgccagttgcccacgatccggacgccggactgttcagcactcagggctacaccctggtgcaaccgtccgacctgcccaaggaccccgcaggcccgttcttccagttgcgctaccggactccggggccactaccgtcaccgcttttgccaggctcctcgtcacccctggagcctctagatctggtgctgctgcggcgcttggaccgagaggaggcggcggcgcaccggctgcagatcgaggcatgggacggcggccgaccccggcgcaccggcctcctgagcgtggagctgcgcgtgctggatgagaacgacaacccgccggtctttgagcaggacgagtcccgcgccgcggtgcgagagcacgcccagccgggcgccgaggtctgtcgcgtgcgcgccaccgcccgcgacgtggggcccaatggcttcgtgcgctacagcgtccgcgcccggcaagtgcctggggcgggtagcggcggcggggcactgggcgacgcggcctacttcgcgttggtggtggaggcccgcgatggaggcgccgagcatgaggttgccgcggtgcgtgtgtccatcgccgtgctggacgtgaatgacaaccggccagcaattcacgtgctctttctcacagagggaggtgtcgcccgtgtctctgaaggcgcccgcccgggcgactacgtggctcgcgtctcggtgtctgacgcgggcggtgactgggagaaggaagatgaggccacaggggagcttggtgtgacagcctctgatgcagattcaggactctatggctttattgaatattctctttatgatggattcctgagctatgaagcacctcaggcattccggatcgaccctcatgatgggcaaatctgtgtttctcaagatatcgacagggaaagggatccagctacctatgatctcctggtggaagctaaggatgggtttgaaatcatgccaggtgcttcatttgaattattcgagataaattctgacactggagaggtagtgacaaccaccatacttgacagagaaattcaagaagtcttcacccttcgagtactagtacgagatgggggattcccttcattgtccagcaccacaacaatcctctgcactgttgaagatgaaaacgatcacgcaccagagtttattgtttccagttatgacattgaggttctggaaaaccaggaaccagaggttgtctatacggttttagcctctgatatggatgctggcaataacagagctgttgaatatcacataattgactcctcagaaccaatcttttacaggatttcttctggtgatctcggcggaaagttctccattcacccgcggctgggcactattcgcacccggaagcccctggatcacgagacgcagcccgtggttgtgctcacggtgcaggcgcagctcggcagcgccccagcctgcagcagcaccgaggtcaacataacagtcatggatgtcaatgacaaccacccagcgttcctcaggacctcggatgagattagaatatcccagaccacgccccctggcacagccttgtacctcgcacgtgcggaagacagagacagtgggcggaacggactcatccggtactccatcgccagcccgcagccaggcgtctttgccatcgacagagccctgggggtgctgttcctcaacggcagcctgggcgcgggcgagcagcgggagctcacgctgactctcagggccgaggaccaaggcgtgcatcctcaggcagccctgctggtgctgacagtcgttatcgagaaacgcgaacacagcccatcctggactttcgaacatttggtctatcaagtggaagtcagtacttctattgtgactgttaaagcttttgctcctgactcaattcaggacagcatgaaatattcaatttttagtggaaatgaagatggagttctttccctgtgctctaagtcaggtgtggtgaactgccttgcttctctcagtcacacagactttctctccctgaaatttgaatcttcggtgaagggacaccaagacagagacaaattacagccaattcatcttgatgacaacaactcaaagaagctgtgctttacattccctagagccactcaggctcttgtattcactgggcactgtctttctgatacatctctccccggttgggtttttgctaccgacttggacagtggtttgaacggcctgattgagtattctattctgtctggcaaccaagaagaagcattccagattgatgcactgagtggtgtgataacaacaaaagcgattctagattacgagctcaccagctcctacagcttgattgtccaagccacagataaagggatgcccaggctttctaatacgactgtaatcaaggtacaggtgactgatataaatgacaatgccccagcttttctcccctctgaagcagtggaaattacagaagtcatgactatttcagaagattctttgcctggtgtaattgtgactcatgtgtcagttcatgatgtggatttgaattcagctttcatattcagttttgccaaagagagtaatcctggaaccaagtttgctattgatcagaacactggagtggtggtgttggtgaaaacattggattttgaagaaatgactgaatatgagctgctcatccaaatttctgattcagtgcactacacagagggagcacttgtagtccgtgtgctggatgtcaatgataatccaccagtgttttctcaagatttctatcaggtcacagttcctgaatcaatacctgtggggtattcagtgctgactctgtcagccacagacttagaaagcaatgagaacatttcttacagaattctatcctcttctaaggaattctccattgatcctaagaatggcacaatatttactatcagtcccgtattacttctggatacaatatcaacaactcgatttcttgtggaagccagtgatggtggaaatcctgacccgagagctcttactttagtggagataggaatagaagatatgaacaattatgcccctgaattcacagtcaaatcctataatcttagcctaagtgaggatgctctggttggaagcacgcttgttacattttcaaacatcgaccatgactggacccgtgaaaacacatatgttgaatattccatcatcagtggtaattcacagaacaattttcatgtggaaactaagttctttcattcagaatatccttataagcaagtcggttatcttgtgttgcttcacagtctggacagagaagcaagtgctagccatgagcttgtcattctggcatctgacagtggctgccctccattgagttccacagctgtcatatcaatacaagtacttgatgtcaatgacaatcccccaaacttcagcagcctgagctatcacacccatgtcaaggaaagcacccctctagggagtcacatcactgtggtctcagcaaatgaccgtgacacagggtcacatgcagaaatcatctacaacatcatctctggaaatgagaagggacatttttacttagaagaaaacactggagttctttatttgattaaacctctggattatgaaaaaatgacaaaattcaccttaactgtccaagcttcagatgcagaaaagaaacatttttcttttgcagttgtgtttgtcagtgtcctggatgataacgaccatgcacctcagtttatgttctcaagcttcagctgtattgttccagaaaatctgcctatttcctctaccatatgctctataaatgctctggattttgatgctggtccgtatggagaattgacctattctattgtatcaccctgttttctcactcatggaatgtcttatgatcatgatctcttcctcattgaccctttgacaggggatattcatgctaagcaaatccttgactatgaaaatggcaataaatactgcctcacagtccaagccaaagacaaaggtgatgcaactgcctccttagtggtctgggtggatattgaagggatagatgaatttgagcccattttcactcaagatcagtattttttcaccctcccagaaaagaataaagacagacagttgattggcagagtggaagcctcagatgcagatgctggtattgatggagtcattctttactcccttggaacctcatctcctttcttttcagtaaatagaaccaatggaaatatttatttgattagagcccttcccctaataaaaagtcaactcaacaaagaagacaccttggaaatgaaaataatcgctcatagtcccaaatcagattccaagtttgcatcttgcactgtttttgtgaatgtgtctttctcctctgaaggaacacccttggcagtgttcgccagcagcttttcaatcagcctggtggtctcctttttagtgtttctgatactcatctgcattctaattgtaatgattttaagacataaacaaaaagacacaataaacaattatgaggagaagaaaacctcatctttagatgcggacttgagagtgacccgggatgccagtgtgctcaaagccttccagaaaactgacgactgcagtaacgaggtggtccctgtggatgccactccggaatggttgagtttaataagtatcatggagaaggatattgtcaatctgtacagatactcaaactccagtggccactgttctgtggaaggagaaactgcagaagataaggaaatccagaggataaatgagcatccctacagaaagtgctcagactcagctctgagtgaccacgagtccagggtgccagactcgggtatcccgagggactcagaccagctctcctgcctatctggggaaactgatgtgatggtgactgccgaaacagcagaagccagccaaacatttggggaaggagatcaaggggaaggctgcagcaccacctgtgctcaaaataatgtgttaccccagacagttcagaagagagaggcaaaagagagcatcctggctgacgttagaaaagagtctgtctttatttcaggtgatcaggaagtaaggtgtgcagctctttcaactcagacgacctctgatcatgatggaaaagacaactatcactggaattatcttcttagttgggagcccaaattccaacctcttgcctcagtatttaatgatattgcaaaactaaaggatgaacatttgcatatgcctggcattccaaaagagaagaaatcttttgtttttccaccccctttgataacagcagtagcccagcctgggattaaagcagtcccaccaagaatgccggcagtaaacctggggcaggtgcctccgaaacacccacgctctcccatcccctaccatcttggttctctgccagaaggcatgactcccaatttttctccatctctttccctattgacgatgcagcctcctgccttgtctccactgttgagagaaggagaattattaggaacacacatcagtggtacatgccatgaacttaaagcagaagatgaagttcaaatatgaaaccactgggatgccaagtacctgctcaccattggtcatgaatgaatgaacaaaatgttttcaagccggcaactcgagattgggctcatttttatctaaaagcaagtgatgtaatttagttagagtttttaaaacttccccattaaagtttctccaatttcaaaaaaaaaaaaaaaaaaaa

SEQ ID NO: 1082 - protein, 3361 aa, Homo sapiens
MEKCGLKEEGSYADIDPVAHDPDAGLFSTQGYTLVQPSDLPKDPAGPFFQLRYRTPGPLPSPLLPGSSSPLEPLDLVLLRRLDREEAAAHRLQIEAWDGGRPRRTGLLSVELRVLDENDNPPVFEQDEYRAAVREDAQPGAEVCRVRATDRDLGPNGFVRYSVRARQVPGAGSGGGALGDAAYFAVEELSGVVRVWRPLDREAQAWHQLVVEARDGGAEPEVATVRVSIAVLDVNDNRPAIHVLFLTEGGVARVSEGARPGDYVARVSVSDADGDWEKEDEATGELGVGLGDGSISLSLEGGEGDFALLPGGPPGVFFLCVEGPLDRESRDLYELLLVATDAGSPPLSTEETLLLRVADLNDQPPLFSQQHYKASVSEAAAPGTVVMWVSASDADEAGSDHAWLRYTVVQLSAPCNLGSLQSKMVHTAECGPSFAIDSESGAISTIRTLDREVQEAVELKVVAQDLGEPPLSATCLVSITVDDVNDNEPIFWRQVYNATIAEHAPVGHCFLQLISAQVASVKIKHKHKEIHEKHNLAYISCPAGTIYVITWADGAAAFSGTDFAFSSDELQAFVLKSLFCELGEGELINWVALDREHRGHHEMTVLVTDRGSPPRNATMAVYVSVTDINDNRPFFPQCLPGKELHVKVLEGQPVNMLVTTVFAKDPDEGNNAEVTYSVSSEDSSDHFKIDANNGEIRTTTILSYDYRPSYRMSVIATDQGVPPLQGQAVVNIQVIPLSKGRAIMSQNIRHLIIPENLKPTKIMSLIKSSDHLQQHYNGKLHFSIVADDKDGHFEIDSSTGDLFLSKELDYETTSHYLFRVITTDHSKNLSLSSTVFLSIDVEDQNDHSPSFQDELIVISVEENVPIGTLVYVFNAKDDDGSFLNSRIQYYIESHNPGTNPFLIHPSFGTLVTVSRLDRESIPTVILTVTASDQAVNVTDRRLRSLTAQIVILDVNDHNPTFISFPNAHVKEDVTVGSLVHHITAHDPDEGRNGKVTYSILSGNENMTFMLDESSGLLTTTCPLDYEMKTQHILTVLALDDGTPALSSSQTLTVTVLDVNDEAPVFKQHLYEASVKENQNPGEFVTRVEALDRDSGMRLNGDPDRELCAGGNPLGSRAPPGSRTPPEGGLSAQAFVRVDLEDVNDNHPVFNPSTYVTSISDETQPGTEIINVLATDQDSGIYGTVAYELIPGNVSSLFTIDSTTGIIYLTLPLSHLESTTLSLMVSAQDGGGLTAVINADVTIHIFQTTLAPAEFERPKYTFLVYEDVPEDSPIGTVKAREPLNPPRSSVIHLQVRVLDANDHSPSFPTLYYQSSVREDAEVGTVVLVLSAVDKDEGLNGQTEYFLTDEACGAFTIDPMSGTLKTSNTLDREARSQHTFSAVARDCSIQGSRSTTVIIKVYVTDVNDNDPVLEQNPFDVFLSPESPTNQTTVIVRADDLDLGPNGTVDSDDSPLLDDFHVHPDTGIIRTARRLDRERRDHYSFVAATLLGAVVQVEIRVNDVNDHSPRFPLDSLQLDVSELSPPGTAFRLPVAHDPDAGLFSTQGYTLVQPSDLPKDPAGPFFQLRYRTPGPLPSPLLPGSSSPLEPLDLVLLRRLDREEAAAHRLQIEAWDGGRPRRTGLLSVELRVLDENDNPPVFEQDESRAAVREHAQPGAEVCRVRATARDVGPNGFVRYSVRARQVPGAGSGGGALGDAAYFALVVEARDGGAEHEVAAVRVSIAVLDVNDNRPAIHVLFLTEGGVARVSEGARPGDYVARVSVSDAGGDWEKEDEATGELGVTASDADSGLYGFIEYSLYDGFLSYEAPQAFRIDPHDGQICVSQDIDRERDPATYDLLVEAKDGFEIMPGASFELFEINSDTGEVVTTTILDREIQEVFTLRVLVRDGGFPSLSSTTTILCTVEDENDHAPEFIVSSYDIEVLENQEPEVVYTVLASDMDAGNNRAVEYHIIDSSEPIFYRISSGDLGGKFSIHPRLGTIRTRKPLDHETQPVVVLTVQAQLGSAPACSSTEVNITVMDVNDNHPAFLRTSDEIRISQTTPPGTALYLARAEDRDSGRNGLIRYSIASPQPGVFAIDRALGVLFLNGSLGAGEQRELTLTLRAEDQGVHPQAALLVLTVVIEKREHSPSWTFEHLVYQVEVSTSIVTVKAFAPDSIQDSMKYSIFSGNEDGVLSLCSKSGVVNCLASLSHTDFLSLKFESSVKGHQDRDKLQPIHLDDNNSKKLCFTFPRATQALVFTGHCLSDTSLPGWVFATDLDSGLNGLIEYSILSGNQEEAFQIDALSGVITTKAILDYELTSSYSLIVQATDKGMPRLSNTTVIKVQVTDINDNAPAFLPSEAVEITEVMTISEDSLPGVIVTHVSVHDVDLNSAFIFSFAKESNPGTKFAIDQNTGVVVLVKTLDFEEMTEYELLIQISDSVHYTEGALVVRVLDVNDNPPVFSQDFYQVTVPESIPVGYSVLTLSATDLESNENISYRILSSSKEFSIDPKNGTIFTISPVLLLDTISTTRFLVEASDGGNPDPRALTLVEIGIEDMNNYAPEFTVKSYNLSLSEDALVGSTLVTFSNIDHDWTRENTYVEYSIISGNSQNNFHVETKFFHSEYPYKQVGYLVLLHSLDREASASHELVILASDSGCPPLSSTAVISIQVLDVNDNPPNFSSLSYHTHVKESTPLGSHITVVSANDRDTGSHAEIIYNIISGNEKGHFYLEENTGVLYLIKPLDYEKMTKFTLTVQASDAEKKHFSFAVVFVSVLDDNDHAPQFMFSSFSCIVPENLPISSTICSINALDFDAGPYGELTYSIVSPCFLTHGMSYDHDLFLIDPLTGDIHAKQILDYENGNKYCLTVQAKDKGDATASLVVWVDIEGIDEFEPIFTQDQYFFTLPEKNKDRQLIGRVEASDADAGIDGVILYSLGTSSPFFSVNRTNGNIYLIRALPLIKSQLNKEDTLEMKIIAHSPKSDSKFASCTVFVNVSFSSEGTPLAVFASSFSISLVVSFLVFLILICILIVMILRHKQKDTINNYEEKKTSSLDADLRVTRDASVLKAFQKTDDCSNEVVPVDATPEWLSLISIMEKDIVNLYRYSNSSGHCSVEGETAEDKEIQRINEHPYRKCSDSALSDHESRVPDSGIPRDSDQLSCLSGETDVMVTAETAEASQTFGEGDQGEGCSTTCAQNNVLPQTVQKREAKESILADVRKESVFISGDQEVRCAALSTQTTSDHDGKDNYHWNYLLSWEPKFQPLASVFNDIAKLKDEHLHMPGIPKEKKSFVFPPPLITAVAQPGIKAVPPRMPAVNLGQVPPKHPRSPIPYHLGSLPEGMTPNFSPSLSLLTMQPPALSPLLREGELLGTHISGTCHELKAEDEVQI

SEQ ID NO: 1083 - DNA, 3333 bp, Homo sapiens
  CDS (15)..(3218)
gcgctccagacaagatggcgcggccggtccggggagggctcggggccccgcgccgctcgccttgccttctccttctctggctggttttggttcggctggagccggtgaccgccgcggccggcccgcgggcgccctgcgcggccgcctgcacttgcgctggggactcgctggactgcggtgggcgcgggctggctgcgttgcccggggacctgccctcctggacgcggagcctaaacctgagttacaacaaactctctgagattgaccctgctggttttgaggacttgccgaacctacaggaagtgcagcacaacaagattcgcagcgtggaggggagccagctgaaggcctacctttccttagaagtgttagatctgagtttgaacaacatcacggaagtgcggaacacctgctttccacacggaccgcctataaaggagctcaacctggcaggcaatcggattggcaccctggagttgggagcatttgatggtctgtcacggtcgctgctaactcttcgcctgagcaaaaacaggatcacccagcttcctgtaagagcattcaagctacccaggctgacacaactggacctcaatcggaacaggattcggctgatagagggcctcaccttccaggggctcaacagcttggaggtgctgaagcttcagcgaaacaacatcagcaaactgacagatggggccttctggggactgtccaagatgcatgtgctgcacctggagtacaacagcctggtagaagtgaacagcggctcgctctacggcctcacggccctgcatcagctccacctcagcaacaattccatcgctcgcattcaccgcaagggctggagcttctgccagaagctgcatgagttggtcctgtccttcaacaacctgacacggctggacgaggagagcctggccgagctgagcagcctgagtgtcctgcgtctcagccacaattccatcagccacattgcggagggtgccttcaagggactcaggagcctgcgagtcttggatctggaccataacgagatttcgggcacaatagaggacacgagcggcgccttctcagggctcgacagcctcagcaagctgactctgtttggaaacaagatcaagtctgtggctaagagagcattctcggggctggaaggcctggagcacctgaaccttggagggaatgcgatcagatctgtccagtttgatgcctttgtgaagatgaagaatcttaaagagctccatatcagcagcgacagcttcctgtgtgactgccagctgaagtggctgcccccgtggctaattggcaggatgctgcaggcctttgtgacagccacctgtgcccacccagaatcactgaagggtcagagcattttctctgtgccaccagagagtttcgtgtgcgatgacttcctgaagccacagatcatcacccagccagaaaccaccatggctatggtgggcaaggacatccggtttacatgctcagcagccagcagcagcagctcccccatgacctttgcctggaagaaagacaatgaagtcctgaccaatgcagacatggagaactttgtccacgtccacgcgcaggacggggaagtgatggagtacaccaccatcctgcacctccgtcaggtcactttcgggcacgagggccgctaccaatgtgtcatcaccaaccactttggctccacctattcacataaggccaggctcaccgtgaatgtgttgccatcattcaccaaaacgccccacgacataaccatccggaccaccaccgtggcccgcctcgaatgtgctgccacaggtcacccaaaccctcagattgcctggcagaaggatggaggcacggatttccccgctgcccgtgagcgacgcatgcatgtcatgccggatgacgacgtgtttttcatcactgatgtgaaaatagatgacgcaggggtttacagctgtactgctcagaactcagccggttctatttcagctaatgccaccctgactgtcctagagaccccatccttggtggtccccttggaagaccgtgtggtatctgtgggagaaacagtggccctccaatgcaaagccacggggaaccctccgccccgcatcacctggttcaagggggaccgcccgctgagcctcactgagcggcaccacctgacccctgacaaccagctcctggtggttcagaacgtggtggcagaggatgcgggccgatatacctgtgagatgtccaacaccctgggcacggagcgagctcacagccagctgagcgtcctgcccgcagcaggctgcaggaaggatgggaccacggtaggcatcttcaccattgctgtcgtgagcagcatcgtcctgacgtcactggtctgggtgtgcatcatctaccagaccaggaagaagagtgaagagtacagtgtcaccaacacagatgaaaccgtcgtgccaccagatgttccaagctacctctcttctcaggggaccctttctgaccgacaagaaaccgtggtcaggaccgagggtggccctcaggccaatgggcacattgagagcaatggtgtgtgtccaagagatgcaagccactttccagagcccgacactcacagcgttgcctgcaggcagccaaagctctgtgctgggtctgcgtatcacaaagagccgtggaaagcgatggagaaagctgaagggacacctgggccacataagatggaacacggtggccgggtcgtatgcagtgactgcaacaccgaagtggactgttactccaggggacaagccttccacccccagcctgtgtccagagacagcgcacagccaagtgcgccaaatggcccggagccgggtgggagtgaccaagagcattctccacatcaccagtgcagcaggactgccgctgggtcctgccccgagtgccaagggtcgctctaccccagtaaccacgatagaatgctgacggctgtgaagaaaaagccaatggcatctctagatgggaaaggggattcttcctggactttagcaaggttgtatcacccggactccacagagctacagcctgcatcttcattaacttcaggcagtccagagcgcgcggaagcccagtacttgcttgtttccaatggccacctccccaaagcatgtgacgccagtcccgagtccacgccactgacaggacagctccccgggaaacagagggtgccactgctgttggcaccaaaaagctaggttttgtctacctcagttcttgtcataccaatctctacgggaaagagaggtaggagaggctgcgaggaagcttgggttcaagcgtcactcatctgtacatagttgtaactcc

SEQ ID NO: 1084 - protein, 1068 aa, Homo sapiens
MARPVRGGLGAPRRSPCLLLLWLVLVRLEPVTAAAGPRAPCAAACTCAGDSLDCGGRGLAALPGDLPSWTRSLNLSYNKLSEIDPAGFEDLPNLQEVQHNKIRSVEGSQLKAYLSLEVLDLSLNNITEVRNTCFPHGPPIKELNLAGNRIGTLELGAFDGLSRSLLTLRLSKNRITQLPVRAFKLPRLTQLDLNRNRIRLIEGLTFQGLNSLEVLKLQRNNISKLTDGAFWGLSKMHVLHLEYNSLVEVNSGSLYGLTALHQLHLSNNSIARIHRKGWSFCQKLHELVLSFNNLTRLDEESLAELSSLSVLRLSHNSISHIAEGAFKGLRSLRVLDLDHNEISGTIEDTSGAFSGLDSLSKLTLFGNKIKSVAKRAFSGLEGLEHLNLGGNAIRSVQFDAFVKMKNLKELHISSDSFLCDCQLKWLPPWLIGRMLQAFVTATCAHPESLKGQSIFSVPPESFVCDDFLKPQIITQPETTMAMVGKDIRFTCSAASSSSSPMTFAWKKDNEVLTNADMENFVHVHAQDGEVMEYTTILHLRQVTFGHEGRYQCVITNHFGSTYSHKARLTVNVLPSFTKTPHDITIRTTTVARLECAATGHPNPQIAWQKDGGTDFPAARERRMHVMPDDDVFFITDVKIDDAGVYSCTAQNSAGSISANATLTVLETPSLVVPLEDRVVSVGETVALQCKATGNPPPRITWFKGDRPLSLTERHHLTPDNQLLVVQNVVAEDAGRYTCEMSNTLGTERAHSQLSVLPAAGCRKDGTTVGIFTIAVVSSIVLTSLVWVCIIYQTRKKSEEYSVTNTDETVVPPDVPSYLSSQGTLSDRQETVVRTEGGPQANGHIESNGVCPRDASHFPEPDTHSVACRQPKLCAGSAYHKEPWKAMEKAEGTPGPHKMEHGGRVVCSDCNTEVDCYSRGQAFHPQPVSRDSAQPSAPNGPEPGGSDQEHSPHHQCSRTAAGSCPECQGSLYPSNHDRMLTAVKKKPMASLDGKGDSSWTLARLYHPDSTELQPASSLTSGSPERAEAQYLLVSNGHLPKACDASPESTPLTGQLPGKQRVPLLLAPKS

SEQ ID NO: 1085 - DNA, 5101 bp, Homo sapiens
  CDS (77)..(3307)
atcctcctacctcagtctactgagtagctaggactacaggcatgtgccaccacacctggctagtttttattttttgatgagatgggatcttgctgtgttgcccagactggtcttgatctcctgggctcaagtgatcctcctgccttggcctgcggccgcctgcacttgcgctggggactcgctggactgcggtgggcgcgggctggctgcgttgcccggggacctgccctcctggacgcggagcctaaacctgagttacaacaaactctctgagattgaccctgctggttttgaggacttgccgaacctacaggaagtgtacctcaataataatgagttgacagcggtaccatccctgggcgctgcttcatcacatgtcgtctctctctttctgcagcacaacaagattcgcagcgtggaggggagccagctgaaggcctacctttccttagaagtgttagatctgagtttgaacaacatcacggaagtgcggaacacctgctttccacacggaccgcctataaaggagctgaacctggcaggcaatcggattggcaccctggagttgggagcatttgatggtctgtcacggtcgctgctaactcttcgcctgagcaaaaacaggatcacccagcttcctgtaagagcattcaagctacccaggctgacacaactggacctcaatcggaacaggattcggctgatagagggcctcaccttccaggggctcaacagcttggaggtgctgaagcttcagcgaaacaacatcagcaaactgacagatggggccttctggggactgtccaagatgcatgtgctgcacctggagtacaacagcctggtagaagtgaacagcggctcgctctacggcctcacggccctgcatcagctccacctcagcaacaattccatcgctcgcattcaccgcaagggctggagcttctgccagaagctgcatgagttggtcctgtccttcaacaacctgacacggctggacgaggagagcctggccgagctgagcagcctgagtgtcctgcgtctcagccacaattccatcagccacattgcggagggtgccttcaagggactcaggagcctgcgagtcttggatctggaccataacgagatttcgggcacaatagaggacacgagcggcgccttctcagggctcgacagcctcagcaagctgactctgtttggaaacaagatcaagtctgtggctaagagagcattctcggggctggaaggcctggagcacctgaaccttggagggaatgcgatcagatctgtccagtttgatgcctttgtgaagatgaagaatcttaaagagctccatatcagcagcgacagcttcctgtgtgactgccagctgaagtggctgcccccgtggctaattggcaggatgctgcaggcctttgtgacagccacctgtgcccacccagaatcactgaagggtcagagcattttctctgtgccaccagagagtttcgtgtgcgatgacttcctgaagccacagatcatcacccagccagaaaccaccatggctatggtgggcaaggacatccggtttacatgctcagcagccagcagcagcagctcccccatgacctttgcctggaagaaagacaatgaagtcctgaccaatgcagacatggagaactttgtccacgtccacgcgcaggacggggaagtgatggagtacaccaccatcctgcacctccgtcaggtcactttcgggcacgagggccgctaccaatgtgtcatcaccaaccactttggctccacctattcacataaggccaggctcaccgtgaatgtgttgccatcattcaccaaaacgccccacgacataaccatccggaccaccaccatggcccgcctcgaatgtgctgccacaggtcacccaaaccctcagattgcctggcagaaggatggaggcacggatttccccgctgcccgtgagcgacgcatgcatgtcatgccggatgacgacgtgtttttcatcactgatgtgaaaatagatgacgcaggggtttacagctgtactgctcagaactcagccggttctatttcagctaatgccaccctgactgtcctagagaccccatccttggtggtccccttggaagaccgtgtggtatctgtgggagaaacagtggccctccaatgcaaagccacggggaaccctccgccccgcatcacctggttcaagggggaccgcccgctgagcctcactgagcggcaccacctgacccctgacaaccagctcctggtggttcagaacgtggtggcagaggatgcgggccgatatacctgtgagatgtccaacaccctgggcacggagcgagctcacagccagctgagcgtcctgcccgcagcaggctgcaggaaggatgggaccacggtaggcatcttcaccattgctgtcgtgagcagcatcgtcctgacgtcactggtctgggtgtgcatcatctaccagaccaggaagaagagtgaagagtacagtgtcaccaacacagatgaaaccgtcgtgccaccagatgttccaagctacctctcttctcaggggaccctttctgaccgacaagaaaccgtggtcaggaccgagggtggccctcaggccaatgggcacattgagagcaatggtgtgtgtccaagagatgcaagccactttccagagcccgacactcacagcgttgcctgcaggcagccaaagctctgtgctgggtctgcgtatcacaaagagccgtggaaagcgatggagaaagctgaagggacacctgggccacataagatggaacacggtggccgggtcgtatgcagtgactgcaacaccgaagtggactgttactccaggggacaagccttccacccccagcctgtgtccagagacagcgcacagccaagtgcgccaaatggcccggagccgggtgggagtgaccaagagcattctccacatcaccagtgcagcaggactgccgctgggtcctgccccgagtgccaagggtcgctctaccccagtaaccacgatagaatgctgacggctgtgaagaaaaagccaatggcatctctagatgggaaaggggattcttcctggactttagcaaggttgtatcacccggactccacagagctacagcctgcatcttcattaacttcaggcagtccagagcgcgcggaagcccagtacttgcttgtttccaatggccacctccccaaagcatgtgacgccagtcccgagtccacgccactgacaggacagctccccgggaaacagagggtgccactgctgttggcaccaaaaagctaggttttgtctacctcagttcttgtcataccaatctctacgggaaagagaggtaggagaggctgcgaggaagcttgggttcaagcgtcactcatctgtacatagttgtaactcccatgtggagtatcagtcgctcacaggacttggatctgaagcacagtaaacgcaagaggggatttgtgtacaaaaggcaaaaaaaagtatttgatatcattgtacataagagttttcagagatttcatatatatcttttacagaggctattttaatctttagtgcatggttaacagaaaaaaattatacaattttgacaatattatttttcgtatcaggttgctgtttaattttggagggggtggggaaatagttctggtgccttaacgcatggctggaatttatagaggctacaaccacatttgttcacaggagtttttggtgcggggtgggaaggatggaaggccttggatttatattgcacttcatagacccctaggctgctgtgcggtgggactccacatgcgccggaaggagcttcaggtgagcactgctcatgtgtggatgcccctgcaacaggcttccctgtctgtagagccaggggtgcaagtgccatccacacttgcagtgaatggcttttccttttaggtttaagtcctgtctgtctgtaaggcgtagaatctgtccgtctgtaaggcgtagaatgagggttgttaatccatcacaagcaaaaggtcagaacagttaaacactgcctttcctcctcctcttattttatgataaaagcaaatgtggccttctcagtatcattcgattgctatttgagacttttaaattaaggtaaaggctgctggtgttggtacctgtggatttttctatactgatgttttcgttttgccaatataatgagtattacattggccttgggggacagaaaggaggaagttctgacttttcagggctaccttatttctactaaggacccagagcaggcctgtccatgccattccttcgcacagatgaaactgagctgggactggaaaggacagcccttgacctgggttctgggtataatttgcacttttgagactggtagctaaccatcttatgagtgccaatgtgtcatttagtaaaacttaaatagaaacaaggtccttcaaatgttcctttggccaaaagctgaagggagttactgagaaaatagttaacaattactgtcaggtgtcatcactgttcaaaaggtaagcacatttagaattttgttcttgacagttaactgactaatcttacttccacaaaatatgtgaatttgctgcttctgagaggcaatgtgaaagagggagtattacttttatgtacaaagttatttatttatagaaattttggtacagtgtacattgaaaaccatgtaaaatattgaagtgtctaacaaatggcattgaagtgtctttaataaaggttcatttataaatgtcagtatagttggtggtccttcttttacaaacgcagtcattctgcctttaattatcttcccccaaaaaagaaaaaaaaaataggcgaagcaaaatcacatactgtttgtttgctccagggcagacaacactgctagattcctgacattttgttttgaatttttctacacctggagcttgttagtcaaggtctaaaatccctaagtgtggtgacctttccatttcatcctgccttttcaaagctggcccaggccctcctttcagtctgacatgagaatggcgagaatggctcacccaccgtgccctcctgcacgaagccagctgggcc

SEQ ID NO: 1086 - protein, 1077 aa, Homo sapiens
MRWDLAVLPRLVLISWAQVILLPWPAAACTCAGDSLDCGGRGLAALPGDLPSWTRSLNLSYNKLSEIDPAGFEDLPNLQEVYLNNNELTAVPSLGAASSHVVSLFLQHNKIRSVEGSQLKAYLSLEVLDLSLNNITEVRNTCFPHGPPIKELNLAGNRIGTLELGAFDGLSRSLLTLRLSKNRITQLPVRAFKLPRLTQLDLNRNRIRLIEGLTFQGLNSLEVLKLQRNNISKLTDGAFWGLSKMHVLHLEYNSLVEVNSGSLYGLTALHQLHLSNNSIARIHRKGWSFCQKLHELVLSFNNLTRLDEESLAELSSLSVLRLSHNSISHIAEGAFKGLRSLRVLDLDHNEISGTIEDTSGAFSGLDSLSKLTLFGNKIKSVAKRAFSGLEGLEHLNLGGNAIRSVQFDAFVKMKNLKELHISSDSFLCDCQLKWLPPWLIGRMLQAFVTATCAHPESLKGQSIFSVPPESFVCDDFLKPQIITQPETTMAMVGKDIRFTCSAASSSSSPMTFAWKKDNEVLTNADMENFVHVHAQDGEVMEYTTILHLRQVTFGHEGRYQCVITNHFGSTYSHKARLTVNVLPSFTKTPHDITIRTTTMARLECAATGHPNPQIAWQKDGGTDFPAARERRMHVMPDDDVFFITDVKIDDAGVYSCTAQNSAGSISANATLTVLETPSLVVPLEDRVVSVGETVALQCKATGNPPPRITWFKGDRPLSLTERHHLTPDNQLLVVQNVVAEDAGRYTCEMSNTLGTERAHSQLSVLPAAGCRKDGTTVGIFTIAVVSSIVLTSLVWVCIIYQTRKKSEEYSVTNTDETVVPPDVPSYLSSQGTLSDRQETVVRTEGGPQANGHIESNGVCPRDASHFPEPDTHSVACRQPKLCAGSAYHKEPWKAMEKAEGTPGPHKMEHGGRVVCSDCNTEVDCYSRGQAFHPQPVSRDSAQPSAPNGPEPGGSDQEHSPHHQCSRTAAGSCPECQGSLYPSNHDRMLTAVKKKPMASLDGKGDSSWTLARLYHPDSTELQPASSLTSGSPERAEAQYLLVSNGHLPKACDASPESTPLTGQLPGKQRVPLLLAPKS

SEQ ID NO: 1087 - DNA, 4762 bp, Homo sapiens
  CDS (15)..(3293)
gcgctccagacaagatggcgcggccggtccggggagggctcggggccccgcgccgctcgccttgccttctccttctctggctggttttggttcggctggagccggtgaccgccgcggccggcccgcgggcgccctgcgcggccgcctgcacttgcgctggggactcgctggactgcggtgggcgcgggctggctgcgttgcccggggacctgccctcctggacgcggagcctaaacctgagttacaacaaactctctgagattgaccctgctggttttgaggacttgccgaacctacaggaagtgtacctcaataataatgagttgacagcggtaccatccctgggcgctgcttcatcacatgtcgtctctctctttctgcagcacaacaagattcgcagcgtggaggggagccagctgaaggcctacctttccttagaagtgttagatctgagtttgaacaacatcacggaagtgcggaacacctgctttccacacggaccgcctataaaggagctcaacctggcaggcaatcggattggcaccctggagttgggagcatttgatggtctgtcacggtcgctgctaactcttcgcctgagcaaaaacaggatcacccagcttcctgtaagagcattcaagctacccaggctgacacaactggacctcaatcggaacaggattcggctgatagagggcctcaccttccaggggctcaacagcttggaggtgctgaagcttcagcgaaacaacatcagcaaactgacagatggggccttctggggactgtccaagatgcatgtgctgcacctggagtacaacagcctggtagaagtgaacagcggctcgctctacggcctcacggccctgcatcagctccacctcagcaacaattccatcgctcgcattcaccgcaagggctggagcttctgccagaagctgcatgagttggtcctgtccttcaacaacctgacacggctggacgaggagagcctggccgagctgagcagcctgagtgtcctgcgtctcagccacaattccatcagccacattgcggagggtgccttcaagggactcaggagcctgcgagtcttggatctggaccataacgagatttcgggcacaatagaggacacgagcggcgccttctcagggctcgacagcctcagcaagctgactctgtttggaaacaagatcaagtctgtggctaagagagcattctcggggctggaaggcctggagcacctgaaccttggagggaatgcgatcagatctgtccagtttgatgcctttgtgaagatgaagaatcttaaagagctccatatcagcagcgacagcttcctgtgtgactgccagctgaagtggctgcccccgtggctaattggcaggatgctgcaggcctttgtgacagccacctgtgcccacccagaatcactgaagggtcagagcattttctctgtgccaccagagagtttcgtgtgcgatgacttcctgaagccacagatcatcacccagccagaaaccaccatggctatggtgggcaaggacatccggtttacatgctcagcagccagcagcagcagctcccccatgacctttgcctggaagaaagacaatgaagtcctgaccaatgcagacatggagaactttgtccacgtccacgcgcaggacggggaagtgatggagtacaccaccatcctgcacctccgtcaggtcactttcgggcacgagggccgctaccaatgtgtcatcaccaaccactttggctccacctattcacataaggccaggctcaccgtgaatgtgttgccatcattcaccaaaacgccccacgacataaccatccggaccaccaccgtggcccgcctcgaatgtgctgccacaggtcacccaaaccctcagattgcctggcagaaggatggaggcacggatttccccgctgcccgtgagcgacgcatgcatgtcatgccggatgacgacgtgtttttcatcactgatgtgaaaatagatgacgcaggggtttacagctgtactgctcagaactcagccggttctatttcagctaatgccaccctgactgtcctagagaccccatccttggtggtccccttggaagaccgtgtggtatctgtgggagaaacagtggccctccaatgcaaagccacggggaaccctccgccccgcatcacctggttcaagggggaccgcccgctgagcctcactgagcggcaccacctgacccctgacaaccagctcctggtggttcagaacgtggtggcagaggatgcgggccgatatacctgtgagatgtccaacaccctgggcacggagcgagctcacagccagctgagcgtcctgcccgcagcaggctgcaggaaggatgggaccacggtaggcatcttcaccattgctgtcgtgagcagcatcgtcctgacgtcactggtctgggtgtgcatcatctaccagaccaggaagaagagtgaagagtacagtgtcaccaacacagatgaaaccgtcgtgccaccagatgttccaagctacctctcttctcaggggaccctttctgaccgacaagaaaccgtggtcaggaccgagggtggccctcaggccaatgggcacattgagagcaatggtgtgtgtccaagagatgcaagccactttccagagcccgacactcacagcgttgcctgcaggcagccaaagctctgtgctgggtctgcgtatcacaaagagccgtggaaagcgatggagaaagctgaagggacacctgggccacataagatggaacacggtggccgggtcgtatgcagtgactgcaacaccgaagtggactgttactccaggggacaagccttccacccccagcctgtgtccagagacagcgcacagccaagtgcgccaaatggcccggagccgggtgggagtgaccaagagcattctccacatcaccagtgcagcaggactgccgctgggtcctgccccgagtgccaagggtcgctctaccccagtaaccacgatagaatgctgacggctgtgaagaaaaagccaatggcatctctagatgggaaaggggattcttcctggactttagcaaggttgtatcacccggactccacagagctacagcctgcatcttcattaacttcaggcagtccagagcgcgcggaagcccagtacttgcttgtttccaatggccacctccccaaagcatgtgacgccagtcccgagtccacgccactgacaggacagctccccgggaaacagagggtgccactgctgttggcaccaaaaagctaggttttgtctacctcagttcttgtcataccaatctctacgggaaagagaggtaggagaggctgcgaggaagcttgggttcaagcgtcactcatctgtacatagttgtaactcccatgtggagtatcagtcgctcacaggacttggatctgaagcacagtaaacgcaagaggggatttgtgtacaaaaggcaaaaaaagtatttgatatcattgtacataagagttttcagagatttcatatatatcttttacagaggctattttaatctttagtgcatggttaacagaaaaaaattatacaattttgacaatattatttttcgtatcaggttgctgtttaattttggagggggtggggaaatagttctggtgccttaacgcatggctggaatttatagaggctacaaccacatttgttcacaggagtttttggtgcggggtgggaaggatggaaggccttggatttatattgcacttcatagacccctaggctgctgtgcggtgggactccacatgcgccggaaggagcttcaggtgagcactgctcatgtgtggatgcccctgcaacaggcttccctgtctgtagagccaggggtgcaagtgccatccacacttgcagtgaatggcttttccttttaggtttaagtcctgtctgtctgtaaggcgtagaatctgtccgtctgtaaggcgtagaatgagggttgttaatccatcacaagcaaaaggtcagaacagttaaacactgcctttcctcctcctcttattttatgataaaagcaaatgtggccttctcagtatcattcgattgctatttgagacttttaaattaaggtaaaggctgctggtgttggtacctgtggatttttctatactgatgttttcgttttgccaatataatgagtattacattggccttgggggacagaaaggaggaagttctgacttttcagggctaccttatttctactaaggacccagagcaggcctgtccatgccattccttcgcacagatgaaactgagctgggactggaaaggacagcccttgacctgggttctgggtataatttgcacttttgagactggtagctaaccatcttatgagtgccaatgtgtcatttagtaaaacttaaatagaaacaaggtccttcaaatgttcctttggccaaaagctgaagggagttactgagaaaatagttaacaattactgtcaggtgtcatcactgttcaaaaggtaagcacatttagaattttgttcttgacagttaactgactaatcttacttccacaaaatatgtgaatttgctgcttctgagaggcaatgtgaaagagggagtattacttttatgtacaaagttatttatttatagaaattttggtacagtgtacattgaaaaccatgtaaaatattgaagtgtctaacaaatggcattgaagtgtctttaataaaggttcatttataaatgtca

SEQ ID NO: 1088 - protein, 1093 aa, Homo sapiens [sequence omitted]

SEQ ID NO: 1089 - DNA, 3333 bp, Homo sapiens
  CDS (15)..(3218)
gcgctccagacaagatggcgcggccggtccggggagggctcggggccccgcgccgctcgccttgccttctccttctctggctggttttggttcggctggagccggtgaccgccgcggccggcccgcgggcgccctgcgcggccgcctgcacttgcgctggggactcgctggactgcggtgggcgcgggctggctgcgttgcccggggacctgccctcctggacgcggagcctaaacctgagttacaacaaactctctgagattgaccctgctggttttgaggacttgccgaacctacaggaagtgcagcacaacaagattcgcagcgtggaggggagccagctgaaggcctacctttccttagaagtgttagatctgagtttgaacaacatcacggaagtgcggaacacctgctttccacacggaccgcctataaaggagctcaacctggcaggcaatcggattggcaccctggagttgggagcatttgatggtctgtcacggtcgctgctaactcttcgcctgagcaaaaacaggatcacccagcttcctgtaagagcattcaagctacccaggctgacacaactggacctcaatcggaacaggattcggctgatagagggcctcaccttccaggggctcaacagcttggaggtgctgaagcttcagcgaaacaacatcagcaaactgacagatggggccttctggggactgtccaagatgcatgtgctgcacctggagtacaacagcctggtagaagtgaacagcggctcgctctacggcctcacggccctgcatcagctccacctcagcaacaattccatcgctcgcattcaccgcaagggctggagcttctgccagaagctgcatgagttggtcctgtccttcaacaacctgacacggctggacgaggagagcctggccgagctgagcagcctgagtgtcctgcgtctcagccacaattccatcagccacattgcggagggtgccttcaagggactcaggagcctgcgagtcttggatctggaccataacgagatttcgggcacaatagaggacacgagcggcgccttctcagggctcgacagcctcagcaagctgactctgtttggaaacaagatcaagtctgtggctaagagagcattctcggggctggaaggcctggagcacctgaaccttggagggaatgcgatcagatctgtccagtttgatgcctttgtgaagatgaagaatcttaaagagctccatatcagcagcgacagcttcctgtgtgactgccagctgaagtggctgcccccgtggctaattggcaggatgctgcaggcctttgtgacagccacctgtgcccacccagaatcactgaagggtcagagcattttctctgtgccaccagagagtttcgtgtgcgatgacttcctgaagccacagatcatcacccagccagaaaccaccatggctatggtgggcaaggacatccggtttacatgctcagcagccagcagcagcagctcccccatgacctttgcctggaagaaagacaatgaagtcctgaccaatgcagacatggagaactttgtccacgtccacgcgcaggacggggaagtgatggagtacaccaccatcctgcacctccgtcaggtcactttcgggcacgagggccgctaccaatgtgtcatcaccaaccactttggctccacctattcacataaggccaggctcaccgtgaatgtgttgccatcattcaccaaaacgccccacgacataaccatccggaccaccaccgtggcccgcctcgaatgtgctgccacaggtcacccaaaccctcagattgcctggcagaaggatggaggcacggatttccccgctgcccgtgagcgacgcatgcatgtcatgccggatgacgacgtgttttccatcactgatgtgaaaatagatgacgcaggggtttacagctgtactgctcagaactcagccggttctatttcagctaatgccaccctgactgtcctagagaccccatccttggtggtccccttggaagaccgtgtggtatctgtgggagaaacagtggccctccaatgcaaagccacggggaaccctccgccccgcatcacctggttcaagggggaccgcccgctgagcctcactgagcggcaccacctgacccctgacaaccagctcctggtggttcagaacgtggtggcagaggatgcgggccgatatacctgtgagatgtccaacaccctgggcacggagcgagctcacagccagctgagcgtcctgcccgcagcaggctgcaggaaggatgggaccacggtaggcatcttcaccattgctgtcgtgagcagcatcgtcctgacgtcactggtctgggtgtgcatcatctaccagaccaggaagaagagtgaagagtacagtgtcaccaacacagatgaaaccgtcgtgccaccagatgttccaagctacctctcttctcaggggaccctttctgaccgacaagaaaccgtggtcaggaccgagggtggccctcaggccaatgggcacattgagagcaatggtgtgtgtccaagagatgcaagccactttccagagcccgacactcacagcgttgcctgcaggcagccaaagctctgtgctgggtctgcgtatcacaaagagccgtggaaagcgatggagaaagctgaagggacacctgggccacataagatggaacacggtggccgggtcgtatgcagtgactgcaacaccgaagtggactgttactccaggggacaagccttccacccccagcctgtgtccagagacagcgcacagccaagtgcgccaaatggcccggagccgggtgggagtgaccaagagcattctccacatcaccagtgcagcaggactgccgctgggtcctgccccgagtgccaagggtcgctctaccccagtaaccacgatagaatgctgacggctgtgaagaaaaagccaatggcatctctagatgggaaaggggattcttcctggactttagcaaggttgtatcacccggactccacagagctacagcctgcatcttcattaacttcaggcagtccagagcgcgcggaagcccagtacttgcttgtttccaatggccacctccccaaagcatgtgacgccagtcccgagtccacgccactgacaggacagctccccgggaaacagagggtgccactgctgttggcaccaaaaagctaggttttgtctacctcagttcttgtcataccaatctctacgggaaagagaggtaggagaggctgcgaggaagcttgggttcaagcgtcactcatctgtacatagttgtaactcc

SEQ ID NO: 1090 - protein, 1068 aa, Homo sapiens
MARPVRGGLGAPRRSPCLLLLWLVLVRLEPVTAAAGPRAPCAAACTCAGDSLDCGGRGLAALPGDLPSWTRSLNLSYNKLSEIDPAGFEDLPNLQEVQHNKIRSVEGSQLKAYLSLEVLDLSLNNITEVRNTCFPHGPPIKELNLAGNRIGTLELGAFDGLSRSLLTLRLSKNRITQLPVRAFKLPRLTQLDLNRNRIRLIEGLTFQGLNSLEVLKLQRNNISKLTDGAFWGLSKMHVLHLEYNSLVEVNSGSLYGLTALHQLHLSNNSIARIHRKGWSFCQKLHELVLSFNNLTRLDEESLAELSSLSVLRLSHNSISHIAEGAFKGLRSLRVLDLDHNEISGTIEDTSGAFSGLDSLSKLTLFGNKIKSVAKRAFSGLEGLEHLNLGGNAIRSVQFDAFVKMKNLKELHISSDSFLCDCQLKWLPPWLIGRMLQAFVTATCAHPESLKGQSIFSVPPESFVCDDFLKPQIITQPETTMAMVGKDIRFTCSAASSSSSPMTFAWKKDNEVLTNADMENFVHVHAQDGEVMEYTTILHLRQVTFGHEGRYQCVITNHFGSTYSHKARLTVNVLPSFTKTPHDITIRTTTVARLECAATGHPNPQIAWQKDGGTDFPAARERRMHVMPDDDVFSITDVKIDDAGVYSCTAQNSAGSISANATLTVLETPSLVVPLEDRVVSVGETVALQCKATGNPPPRITWFKGDRPLSLTERHHLTPDNQLLVVQNVVAEDAGRYTCEMSNTLGTERAHSQLSVLPAAGCRKDGTTVGIFTIAVVSSIVLTSLVWVCIIYQTRKKSEEYSVTNTDETVVPPDVPSYLSSQGTLSDRQETVVRTEGGPQANGHIESNGVCPRDASHFPEPDTHSVACRQPKLCAGSAYHKEPWKAMEKAEGTPGPHKMEHGGRVVCSDCNTEVDCYSRGQAFHPQPVSRDSAQPSAPNGPEPGGSDQEHSPHHQCSRTAAGSCPECQGSLYPSNHDRMLTAVKKKPMASLDGKGDSSWTLARLYHPDSTELQPASSLTSGSPERAEAQYLLVSNGHLPKACDASPESTPLTGQLPGKQRVPLLLAPKS

SEQ ID NO: 1091 - DNA, 4995 bp, Homo sapiens
  misc_feature (238): Wherein n is a or t or c or g.
cctggacctaataccccttcttcctaaagcacaaaatgattaaattgcttaatccagacaactctccaatcccaaatgaagttgttcagttgcatctgaaggacaaaatcgtgggaaactacaccacagatgtaaatggcatcgctcagtttttcttggacacatatacgtttacatacccaaatatcactttgaaagcagcctacaaggccaatgaaaattgccaggctcatggctngggtgttgcctcaataccctcagcccgagtactttgcatatcgattttactccaagatgaatagcttcctaaagattgtccaagagatggaagaactgagatgcaaccagcagaagagggtgctagtgcactgcattctcaatatggaagactttgaagacaaaacctacacagcagacttcaattatttggtgatttcaaaaggtgtaatcattcttcatgggcaacagaaaattgagatcaacgaaaatgggaggaagggcatattttccatttctatagacattaaccctgaattagcgccctcagtagatatgcttgtctatagcttgcatcctggaggagaaatggtcactgatagcacccaattccgaattgagaaatgcttcgaaaatcaggtcaacttaaatttttctaaagaaaaaagtttaccaggatccaatattgatcttcaagtctcggctgcttcaaactctctttgtgctctttgggctgtagaccagagtgtattgctactaaggaattatggtcagctgtcagcacaaactgtgtatagtcagctatattccagggaactacatggctattacttcagaggacttaacttagaagatggccttaaagtgccgtgtcttgaagatgaacatatcctttacaatggaatttattacacacctgcatgggctgactttggaaaagatggctatgaccttgtgaaggatcctcaaaacaatcggatttttcaaaggcaaaatgtgacttctttccgaaatattacccaactctcgttccaactgatttcagaaccaatgtttggagattactggattgttgtgaaaagaaactcaagggagacagtgacacaccaatttgctgttaaaagatatgtgctgcccaagtttgaagttacagtcaatgcaccacaaacagtaactatttcagatgatgaattccaagtggatgtatgtgctaagtacaactttggccaacctgtgcaaggggaaacccaaatccgggtgtgcagagagtatttttcttcaagcaattgtgagaaaaatgaaaatgaaatatgtgagcaatttattgcacagttggaaaatggttgtgtttctcaaattgtaaatacaaaagtcttccaactctaccgttcgggattgttcatgacatttcatgtcgctgtaattgttacagaatctgggacagttatgcagatcagcgagaagacctcagtttttatcactcaattgcttggaactgtaaactttgagaacatggatacattctatagaagagggatttcttattttggaactcttaaattttcggatcccaataatgtacctatggtgaacaagttgttgcaactggagctcaatgatgaatttataggaaattacactacggatgagaatggcgaagctcaattttccattgacacttcagacatatttgatccagagttcaacctaaaagccacatatgttcgacctgagagctgctatcttcccagctggttgacgcctcagtacttggatgctcacttcttagtctcacgcttttactcccgaaccaacagcttcctgaagattgttccagaaccaaagcagcttgaatgtaatcaacagaaggttgttactgtgcattactccctaaacagtgaagcatatgaggatgattccaatgtaaagttcttctatttgatgatggtaaaaggagctatcttactcagtggacaaaaggaaatcagaaacaaagcctggaatggaaacttctcgttcccaatcagcatcagtgctgatctggctcctgcagccgtcctgtttgtctatacccttcaccccagtggggaaattgtggctgacagtgtcagattccaggttgacaagtgctttaaacacaaggttaacataaagttctctaacgagcagggcttacctggttccaatgctagtctctgtcttcaagcggcgcctgtcttattctgtgccctcagggctgtggataggaatgtccttctactgaaatctgaacaacagctgtcagctgaaagtgtgtataacatggttccaagtatagagccgtatggttatttctaccatggcctcaatcttgatgatggcaaggaagacccttgcattcctcagagggatatgttctacaatggtttatattacacacctgtaagcaactatggggatggagatatctataatattgtcaggaacatgggtctaaaagtctttaccaatctccattaccgaaaaccagaaaaaattatggtccaatgcgtagtgttccgtctagaattgcatgtagctagtggaatcagaggggagaatgctgactatgtagaacaggctataattcaaacagtaagaacaaacttcccagagacatggatgtgggacctcgtcagtgtcgattcctcaggctctgccaatctttcgttcctcattcctgatacgataacccaatgggaggcaagtggcttttgtgtgaatggtgacgttggatttggcatttcctctacaaccactctagaagtctcccaacctttctttattgagattgcctcacccttttcggttgttcaaaatgaacaatttgatttgattgtcaatgtcttcagctaccggaatacatgtgtagagatttctgttcaagtggaggagtctcagaattatgaagcaaatattcataccttgaaaatcaatggcagtgaggttattcaagctggagggaggaaaacaaacgtctggactattatacctaagaaattgggtaaagtgaatatcactgtagttgctgagtccaaacaaagcagtgcttgcccaaatgaaggaatggagcagcaaaagctaaactggaaagacactgtggtccaaagcttcttagtagagcctgaaggtattgaaaaggaaaggacccagagtttccttatctgtacagaaggtgccaaagcctccaagcagggagttttggacttgccaaacgatgtagtagaagggtcagccagaggctttttcactgttgtgggggatattctaggacttgccttgcagaatctggttgttctccaaatgccctatggaagtggagagcagaatgctgccctactagcatctgatacttatgttctggactatctgaaatctactgagcaactgacagaggaagttcaatctaaggctttctttctcttatctaatggttatcaaaggcaattatctttcaaaaactctgatggttcctatagtgtgttttggcagcagagtcagaaaggaagcatatggctcagtgctcttacttttaagacattggagagaatgaaaaaatatgtattcattgatgaaaatgttcaaaaacagaccttaatctggctttcaagccaacagaaaacaagcggctgctttaagaatgatggccagcttttcaaccacgcctgggagggtggagatgaagaggacatttcactcactgcgtatgttgttgggatgttctttgaagctgggctcaatttcacttttcctgctctacgaaacgcactcttttgccttgaagcggcattggacagtggtgtcactaatggctataatcatgcaattctagcttatgcttttgccttagctggaaaagagaagcaagtggaatctttactccaaaccctggatcaatctgccccaaaactaaataatgtcatctactgggaaagagaaaggaaacccaagacagaagaatttccatcctttattccctgggcaccttctgctcagactgagaagagttgctacgtgctgttggctgtcatttcccggaaaattcctgacctcacctatgctagtaagattgtgcagtggcttgcccaacggatgaattcccatggaggcttttcttccaaccagacacctgatgatactctgttcaaattatatacgggccaaaaagaaagctttcgctctagttctgtgggctatacactgggaaaagcaaatgaaaagaaggaaaacaggagaaatgggggtgaaggatccagtgagattttccaggttaacggtcataaccgcctactggtccaacgttcagaagtaacacaggcacctggagaatacacagtagatgtggaaggacacggttgtacatttatccaggccacccttaagtacaatgttctcctacctaagaaggcatctggattttctctttccttggaaatagtaaagaactactcttcgactgcttttgacctcacagtgaccctcaaatacactggaattcgcaataaatccagtatggtggttatagatgtaaaaatgctatcaggatttactccaaccatgtcatccattgaagagcttgaaaacaagggccaagtgatgaagactgaagtcaagaatgaccatgttcttttctacttggaaaatgtaggttttggtcgagcagacagtttccctttttctgttgagcagagcaaccttgtgttcaacattcagccagccccagccatggtctacgattattatgaaaaagaagaatatgccctagctttttacaacatcgacagtagttcagtttccgagtgagacaaagcaattactagaagagttggagaagcatttcttgtaacaaactgattcttctgtatcaaacctggaaaaaaatcatgaaccatctgacatcgtgaacagtctgcagtgggctatggtttcttgtcaagtcttatttccttatcatcccattaaatgttgtcattttgcaaa

SEQ ID NO: 1092 - protein, 1593 aa, Homo sapiens
MIKLLNPDNSPIPNEVVQLHLKDKIVGNYTTDVNGIAQFFLDTYTFTYPNITLKAAYKANENCQAHGWVLPQYPQPEYFAYRFYSKMNSFLKIVQEMEELRCNQQKRVLVHCILNMEDFEDKTYTADFNYLVISKGVIILHGQQKIEINENGRKGIFSISIDINPELAPSVDMLVYSLHPGGEMVTDSTQFRIEKCFENQVNLNFSKEKSLPGSNIDLQVSAASNSLCALWAVDQSVLLLRNYGQLSAQTVYSQLYSRELHGYYFRGLNLEDGLKVPCLEDEHILYNGIYYTPAWADFGKDGYDLVKDPQNNRIFQRQNVTSFRNITQLSFQLISEPMFGDYWIVVKRNSRETVTHQFAVKRYVLPKFEVTVNAPQTVTISDDEFQVDVCAKYNFGQPVQGETQIRVCREYFSSSNCEKNENEICEQFIAQLENGCVSQIVNTKVFQLYRSGLFMTFHVAVIVTESGTVMQISEKTSVFITQLLGTVNFENMDTFYRRGISYFGTLKFSDPNNVPMVNKLLQLELNDEFIGNYTTDENGEAQFSIDTSDIFDPEFNLKATYVRPESCYLPSWLTPQYLDAHFLVSRFYSRTNSFLKIVPEPKQLECNQQKVVTVHYSLNSEAYEDDSNVKFFYLMMVKGAILLSGQKEIRNKAWNGNFSFPISISADLAPAAVLFVYTLHPSGEIVADSVRFQVDKCFKHKVNIKFSNEQGLPGSNASLCLQAAPVLFCALRAVDRNVLLLKSEQQLSAESVYNMVPSIEPYGYFYHGLNLDDGKEDPCIPQRDMFYNGLYYTPVSNYGDGDIYNIVRNMGLKVFTNLHYRKPEKIMVQCVVFRLELHVASGIRGENADYVEQAIIQTVRTNFPETWMWDLVSVDSSGSANLSFLIPDTITQWEASGFCVNGDVGFGISSTTTLEVSQPFFIEIASPFSVVQNEQFDLIVNVFSYRNTCVEISVQVEESQNYEANIHTLKINGSEVIQAGGRKTNVWTIIPKKLGKVNITVVAESKQSSACPNEGMEQQKLNWKDTVVQSFLVEPEGIEKERTQSFLICTEGAKASKQGVLDLPNDVVEGSARGFFTVVGDILGLALQNLVVLQMPYGSGEQNAALLASDTYVLDYLKSTEQLTEEVQSKAFFLLSNGYQRQLSFKNSDGSYSVFWQQSQKGSIWLSALTFKTLERMKKYVFIDENVQKQTLIWLSSQQKTSGCFKNDGQLFNHAWEGGDEEDISLTAYVVGMFFEAGLNFTFPALRNALFCLEAALDSGVTNGYNHAILAYAFALAGKEKQVESLLQTLDQSAPKLNNVIYWERERKPKTEEFPSFIPWAPSAQTEKSCYVLLAVISRKIPDLTYASKIVQWLAQRMNSHGGFSSNQTPDDTLFKLYTGQKESFRSSSVGYTLGKANEKKENRRNGGEGSSEIFQVNGHNRLLVQRSEVTQAPGEYTVDVEGHGCTFIQATLKYNVLLPKKASGFSLSLEIVKNYSSTAFDLTVTLKYTGIRNKSSMVVIDVKMLSGFTPTMSSIEELENKGQVMKTEVKNDHVLFYLENVGFGRADSFPFSVEQSNLVFNIQPAPAMVYDYYEKEEYALAFYNIDSSSVSE

SEQ ID NO: 1093 - DNA, 4501 bp, Homo sapiens
  CDS (1)..(4308)
tccatttctatagacattaaccctgaattagcgccctcagtagatatgcttgtctatagcttgcatcctggaggagaaatggtcactgatagcacccaattccgaattgagaaatgcttcgaaaatcaggtcaacttaaatttttctaaagaaaaaagtttaccaggatccaatattgatcttcaagtctcggctgcttcaaactctctttgtgctctttgggctgtagaccagagtgtattgctactaaggaattatggtcagctgtcagcacaaactgtgtatagtcagctatattccagggaactacatggctattacttcagaggacttaacttagaagatggccttaaagtgccgtgtcttgaagatgaacatatcctttacaatggaatttattacacacctgcatgggctgactttggaaaagatggctatgaccttgtgaaggatcctcaaaacaatcggatttttcaaaggcaaaatgtgacttctttccgaaatattacccaactctcgttccaactgatttcagaaccaatgtttggagattactggattgttgtgaaaagaaactcaagggagacagtgacacaccaatttgctgttaaaagatatgtgctgcccaagtttgaagttacagtcaatgcaccacaaacagtaactatttcagatgatgaattccaagtggatgtatgtgctaagtacaactttggccaacctgtgcaaggggaaacccaaatccgggtgtgcagagagtatttttcttcaagcaattgtgagaaaaatgaaaatgaaatatgtgagcaatttattgcacagttggaaaatggttgtgtttctcaaattgtaaatacaaaagtcttccaactctaccgttcgggattgttcatgacatttcatgtcgctgtaattgttacagaatctgggacagttatgcagatcagcgagaagacctcagtttttatcactcaattgcttggaactgtaaactttgagaacatggatacattctatagaagagggatttcttattttggaactcttaaattttcggatcccaataatgtacctatggtgaacaagttgttgcaactggagctcaatgatgaatttataggaaattacactacggatgagaatggcgaagctcaattttccattgacacttcagacatatttgatccagagttcaacctaaaagccacatatgttcgacctgagagctgctatcttcccagctggttgacgcctcagtacttggatgctcacttcttagtctcacgcttttactcccgaaccaacagcttcctgaagattgttccagaaccaaagcagcttgaatgtaatcaacagaaggttgttactgtgcattactccctaaacagtgaagcatatgaggatgattccaatgtaaagttcttctatttgatgatggtaaaaggagctatcttactcagtggacaaaaggaaatcagaaacaaagcctggaatggaaacttctcgttcccaatcagcatcagtgctgatctggctcctgcagccgtcctgtttgtctatacccttcaccccagtggggaaattgtggctgacagtgtcagattccaggttgacaagtgctttaaacacaaggttaacataaagttctctaacgagcagggcttacctggttccaatgctagtctctgtcttcaagcggcgcctgtcttattctgtgccctcagggctgtggataggaatgtccttctactgaaatctgaacaacagctgtcagctgaaagtgtgtataacatggttccaagtatagagccgtatggttatttctaccatggcctcaatcttgatgatggcaaggaagacccttgcattcctcagagggatatgttctacaatggtttatattacacacctgtaagcaactatggggatggagatatctataatattgtcaggaacatgggtctaaaagtctttaccaatctccattaccgaaaaccagaaaaaattatggtccaatgcgtagtgttccgtctagaattgcatgtagctagtggaatcagaggggagaatgctgactatgtagaacaggctataattcaaacagtaagaacaaacttcccagagacatggatgtgggacctcgtcagtgtcgattcctcaggctctgccaatctttcgttcctcattcctgatacgataacccaatgggaggcaagtggcttttgtgtgaatggtgacgttggatttggcatttcctctacaaccactctagaagtctcccaacctttctttattgagattgcctcacccttttcggttgttcaaaatgaacaatttgatttgattgtcaatgtcttcagctaccggaatacatgtgtagagatttctgttcaagtggaggagtctcagaattatgaagcaaatattcataccttgaaaatcaatggcagtgaggttattcaagctggagggaggaaaacaaacgtctggactattatacctaagaaattgggtaaagtgaatatcactgtagttgctgagtccaaacaaagcagtgcttgcccaaatgaaggaatggagcagcaaaagctaaactggaaagacactgtggtccaaagcttcttagtagagcctgaaggtattgaaaaggaaaggacccagagtttccttatctgtacagaaggtgccaaagcctccaagcagggagttttggacttgccaaacgatgtagtagaagggtcagccagaggctttttcactgttgtgggggatattctaggacttgccttgcagaatctggttgttctccaaatgccctatggaagtggagagcagaatgctgccctactagcatctgatacttatgttctggactatctgaaatctactgagcaactgacagaggaagttcaatctaaggctttctttctcttatctaatggttatcaaaggcaattatctttcaaaaactctgatggttcctatagtgtgttttggcagcagagtcagaaaggaagcatatggctcagtgctcttacttttaagacattggagagaatgaaaaaatatgtattcattgatgaaaatgttcaaaaacagaccttaatctggctttcaagccaacagaaaacaagcggctgctttaagaatgatggccagcttttcaaccacgcctgggagggtggagatgaagaggacatttcactcactgcgtatgttgttgggatgttctttgaagctgggctcaatttcacttttcctgctctacgaaacgcactcttttgccttgaagcggcattggacagtggtgtcactaatggctataatcatgcaattctagcttatgcttttgccttagctggaaaagagaagcaagtggaatctttactccaaaccctggatcaatctgccccaaaactaaataatgtcatctactgggaaagagaaaggaaacccaagacagaagaatttccatcctttattccctgggcaccttctgctcagactgagaagagttgctacgtgctgttggctgtcatttcccggaaaattcctgacctcacctatgctagtaagattgtgcagtggcttgcccaacggatgaattcccatggaggcttttcttccaaccagacacctgatgatactctgttcaaattatatacgggccaaaaagaaagctttcgctctagttctgtgggctatacactgggaaaagcaaatgaaaagaaggaaaacaggagaaatgggggtgaaggatccagtgagattttccaggttaacggtcataaccgcctactggtccaacgttcagaagtaacacaggcacctggagaatacacagtagatgtggaaggacacggttgtacatttatccaggccacccttaagtacaatgttctcctacctaagaaggcatctggattttctctttccttggaaatagtaaagaactactcttcgactgcttttgacctcacagtgaccctcaaatacactggaattcgcaataaatccagtatggtggttatagatgtaaaaatgctatcaggatttactccaaccatgtcatccattgaagagcttgaaaacaagggccaagtgatgaagactgaagtcaagaatgaccatgttcttttctacttggaaaatgtaggttttggtcgagcagacagtttccctttttctgttgagcagagcaaccttgtgttcaacattcagccagccccagccatggtctacgattattatgaaaaagaagaatatgccctagctttttacaacatcgacagtagttcagtttccgagtgagacaaagcaattactagaagagttggagaagcatttcttgtaacaaactgattcttctgtatcaaacctggaaaaaaatcatgaaccatctgacatcgtgaacagtctgcagtgggctatggtttcttgtcaagtcttatttccttatcatcccattaaatgttgtcattttgcaaaaaaaaaaaaaaaa

SEQ ID NO: 1094 - protein, 1436 aa, Homo sapiens [sequence omitted]

SEQ ID NO: 1095 - DNA, 571 bp, Homo sapiens
  CDS (2)..(571)
caccagatctgaaggatccagtgagattttccaggttaacggtcataatcgcctactggtccaacgttcagaagtaacacaggcacctggagaatacacagtagatgtggaaggacacggttgtacatttatccaggccacccttaagtacaatgttctcctacctaagaaggcatctggattttctctttccttggaaatagtaaagaactactcttcgactgcttttgacctcacagtgaccctcaaatacactggaattcgcaataaatccagtatggtggttatagatgtaaaaatgctatcaggatttactccaaccatgtcatccattgaagagcttgaaaacaagggccaagtgatgaagactgaagtcaagaatgaccatgttcttttctacttggaaaatggttttggtcgagcagacagtttccctttttctgttgagcagagcaaccttgtgttcaacattcagccagccccagccatggtctacgattactatgaaaaagaagaatatgccctagctttttacaacatcgacagtagttcagtttccgagctcgagggc

SEQ ID NO: 1096 - protein, 190 aa, Homo sapiens
TRSEGSSEIFQVNGHNRLLVQRSEVTQAPGEYTVDVEGHGCTFIQATLKYNVLLPKKASGFSLSLEIVKNYSSTAFDLTVTLKYTGIRNKSSMVVIDVKMLSGFTPTMSSIEELENKGQVMKTEVKNDHVLFYLENGFGRADSFPFSVEQSNLVFNIQPAPAMVYDYYEKEEYALAFYNIDSSSVSELEG

SEQ ID NO: 1097 - DNA, 571 bp, Homo sapiens
  CDS (2)..(571)
caccagatctgaaggatccagtgagattttccaggttaacggtcataaccgcctactggtccaacgttcagaagtaacacaggcacctggacaatacacagtagatgtggaaggacacggttgtacatttatccaggccacccttaagtacaatgttctcctacctaagaaggcatctggattttctctttccttggaaatagtaaagaactactcttcgactgcttttgacctcacagtgaccctcaaatacactggaattcgcaataaatccagtatggtggttatagatgtaaaaatgctatcaggatttactccaaccatgtcatccattgaagagcttgaaaacaagggccaagtgatgaagactgaagtcaagaatgaccatgttcttttctacttggaaaatggttttggtcgagcagacagtttccctttttctgttgagcagagcaaccttgtgttcaacattcagccagccccagccatggtctacgattactatgaaaaagaagaatatgccctagctttttacaacatcgacagtagttcagtttccgagctcgagggc

SEQ ID NO: 1098 - protein, 190 aa, Homo sapiens
TRSEGSSEIFQVNGHNRLLVQRSEVTQAPGQYTVDVEGHGCTFIQATLKYNVLLPKKASGFSLSLEIVKNYSSTAFDLTVTLKYTGIRNKSSMVVIDVKMLSGFTPTMSSIEELENKGQVMKTEVKNDHVLFYLENGFGRADSFPFSVEQSNLVFNIQPAPAMVYDYYEKEEYALAFYNIDSSSVSELEG

SEQ ID NO: 1099 - DNA, 571 bp, Homo sapiens
  CDS (2)..(571)
caccagatctgaaggatccagtgagattttccaggttaacggtcataaccgcctactggtccaacgttcagaagtaacacaggcacctggacaatacacagtagatgtggaaggacacggttgtacatttatccaggccacccttaagtacgatgttctcctacctaagaaggcatctggattttctctttccttggaaatagtaaagaactactcttcgactgcttttgacctcacagtgaccctcaaatacactggaattcgcaataaatccagtatggtggttatagatgtaaaaatgctatcaggatttactccaaccatgtcatccattgaagagcttgaaaacaagggccaagtgatgaagactgaagtcaagaatgaccatgttcttttctacttggaaaatggttttggtcgagcagacagtttccctttttctgttgagcagagcaaccttgtgttcaacattcagccagccccagccatggtctacgattactatgaaaaagaagaatatgccctagctttttacaacatcgacagtagttcagtttccgagctcgagggc

SEQ ID NO: 1100 - protein, 190 aa, Homo sapiens
TRSEGSSEIFQVNGHNRLLVQRSEVTQAPGQYTVDVEGHGCTFIQATLKYDVLLPKKASGFSLSLEIVKNYSSTAFDLTVTLKYTGIRNKSSMVVIDVKMLSGFTPTMSSIEELENKGQVMKTEVKNDHVLFYLENGFGRADSFPFSVEQSNLVFNIQPAPAMVYDYYEKEEYALAFYNIDSSSVSELEG

SEQ ID NO: 1101 - DNA, 529 bp, Homo sapiens
  CDS (2)..(529)
caccagatctgaaggatccagtgagattttccaggttaacggtcataaccgcctactggtccaacgttcagaagtaacacaggcacctggacaatacacagtagatgtggaaggacacggttgtacatttatccaggccacccttaagtacaatgttctcctacctaagaaggcatctggattttctctttccttggaaatagtaaagaactactcttcgactgcttttgacctcacagtgaccctcaaatacactggaattcgcaataaatccagtatggtggttatagatgtaaaaatgctatcaggatttactccaaccatgtcatccattgaagagcttgaaaacaagggccaagtgatgaagactgaagtcaagaatgaccatgttcttttctacttggaaaatagcaaccttgtgttcaacattcagccagccccagccatggtctacgattactatgaaaaagaagaatatgccctagctttttacaacatcgacagtagttcagtttccgagctcgagggc

SEQ ID NO: 1102 - protein, 176 aa, Homo sapiens
TRSEGSSEIFQVNGHNRLLVQRSEVTQAPGQYTVDVEGHGCTFIQATLKYNVLLPKKASGFSLSLEIVKNYSSTAFDLTVTLKYTGIRNKSSMVVIDVKMLSGFTPTMSSIEELENKGQVMKTEVKNDHVLFYLENSNLVFNIQPAPAMVYDYYEKEEYALAFYNIDSSSVSELEG

SEQ ID NO: 1103 - DNA, 547 bp, Homo sapiens
  CDS (2)..(547)
caccagatctgaaggatccagtgagattttccaggttaacggtcataatcgcctactggtccaacgttcagaagtaacacaggcacctggacaatacacagtagatgtggaaggacacggttgtacatttatccaggccacccttaagtacaatgttctcctacctaagaaggcatctggattttctctttccttggaaatagtaaagaactactcttcgactgcttttgacctcacagtgaccctcaaatacactggaattcgcaataaatccagtatggtggttatagatgtaaaaatgctatcaggatttactccaaccatgtcatccactgaagagcttgaaaacaagggccaagtgatgaagactgaagtcaagaatgaccatgttcttttctacttggaaaatagcaaccttgtgttcaacattcagccagccccagccatggtctacgattactatgaaaaagaagaatatgccctagctttttacaacatcgacagtagttcagtttccgagctcgagggcaagggcgaatccagcaca

SEQ ID NO: 1104 - protein, 182 aa, Homo sapiens
TRSEGSSEIFQVNGHNRLLVQRSEVTQAPGQYTVDVEGHGCTFIQATLKYNVLLPKKASGFSLSLEIVKNYSSTAFDLTVTLKYTGIRNKSSMVVIDVKMLSGFTPTMSSTEELENKGQVMKTEVKNDHVLFYLENSNLVFNIQPAPAMVYDYYEKEEYALAFYNIDSSSVSELEGKGESST

SEQ ID NO: 1105 - DNA, 4426 bp, Homo sapiens
  CDS (1)..(4233)
atgtactgttttttgcgatctgccgtttcgttcttctgcctcagcctccccaggtgctggggttataggtgtgagccactgtgcctggctattcttttattacagtatgttctgctgattccttctgttctacaagaaggctctttggataaagcttgtgcccagctttttaatctcactgaatctgttgttttgacggtctccctcaactatggtgaggtccagaccaaaatatttgaagaaaatgttactggagaaaatttcttcaaatgcatcagctttgaggttcctcaggccagatctgacccactggcatttattacattttctgctaaaggagccactctcaacctggaagagaggagatctgtggcaatcagatccagagagaatgtggtctttgtacagactgataaacccacctacaagcctggacagtataataaaaagccgatcagtcacataatgccagtgatagcagtcactgaacaggatccagaaggcaatcgaatacaacagtgggtgaatgaggagtctgtgggagggattctacaactctccttccagttaatctcagagcccatcctcggatggtatgaaatcaccgtggagatgctcaatgagaagaaaacatatcactccttctctgtggaagaatatgtgttacccaaatttcaaatgactgtggatgcaccagaaaatatcttagttgtggactctgaattcaaagtgaatgtctgtgccttgtatacctatggtgaacctgtggacgggaaggtccaacttagtgtgtgcagagaatctacggcttatcattcatgtgctcatcttatcagttcactctgtaaaaattttaccttggggaaagatggctgtgtctccaagtttattaacacagatgcttttgagttaaatcgggaaggatactggagtttcctcaaagtgcatgctcttgttacagagcttacaggctccaagtacgtatacatagactcatcagtggtgaagattagttttgagaatatggatatgtcctacaaacagggactcccttattttggccagattaaattgcttaatccagacaactctccaatcccaaatgaagttgttcagttgcatctgaaggacaaaatcgtgggaaactacaccacagatgtaaatggcatcgctcagtttttcttggacacatatacgtttacatacccaaatatcactttgaaagcagcctacaaggccaatgaaaattgccaggctcatggctgggtgttgcctcaataccctcagcccgagtactttgcatatcgattttactccaagatgaatagcttcctaaagattgtccaagagatggaagaactgagatgcaaccagcagaagagggtgctagtgcactgcattctcaatatggaagactttgaagacaaaacctacacagcagacttcaattatttggtgatttcaaaaggtgtaatcattcttcatgggcaacagaaaattgagatcaacgaaaatgggaggaagggcatattttccatttctatagacattaaccctgaattagcgccctcagtacatatgcttgtctatagcttgcatcctggaggagaaatggtcactgatagcacccaattccaattgagaaatgttaacataaagttctctaacgagcagggcttacctggttccaatgctagtctctgtcttcaagcggcgcctgtcttattctgtgccctcagggctgtggataggaatgtccttctactgaaatctgaacaacagctgtcagctgaaagtgtgtataacatggttccaagtatagagccgtatggttatttctaccatggcctcaatcttgatgatggcaaggaagacccttgcattcctcagagggatatgttctacaatggtttatattacacacctgtaagcaactatggggatggagatatctataatattgtcaggaacatgggtctaaaagtctttaccaatctccattaccgaaaaccagaagtatgtgtgatggagagaaggctgccactccctaagccgctttatctggaaacagaaaattatggtccaatgcgtagtgttccgtctagaattgcatctagtggaatcagaggggagaatgctgactatgtagaacaggctataattcaaacagtaagaacaaacttcccagagacatggatgtgggacctcgtcagtgtcgattcctcaggctctgccaatctttcgttcctcattcctgatacgataacccaatgggaggcaagtggcttttgtgtgaatggtgacgttggatttggcatttcctctacaaccactctagaagtctcccaacctttctttattgagattgcctcacccttttcggttgttcaaaatgaacaatttgatttgattgtcaatgtcttcagctaccggaatacatgtgtagagatttctgttcaagtggaggagtctcagaattatgaagcaaatattcataccttgaaaatcaatggcagtgaggttattcaagctggagggaggaaaacaaacgtctggactattatacctaagaaattgggcaaagtgaatatcactgtagttgctgagtccaaacaaagcagtgcttgcccaaatgaaggaatggagcagcaaaagctaaactggaaagacactgtggtccaaagcttcttagtagagcctgaaggtattgaaaaggaaaggacccagagtttccttatctgtacagaaggtgccaaagcctccaagcagggagttttggacttgccaaacgatgtagtagaagggtcagccagaggctttttcactgttgtgggggatattctaggacttgccttgcagaatctggttgttctccaaatgccctatggaagtggagagcagaatgctgccctactagcatctgatacttatgttctggactatctgaaatctactgagcaactgacagaggaagttcaatctaaggctttctttctcttatctaatggttatcaaaggcaattatctttcaaaaactctgatggttcctatagtgtgttttggcagcagagtcagaaaggaagcatatggctcagtgctcttacttttaagacattggagagaatgaaaaaatatgtattcattgatgaaaatgttcaaaaacagaccttaatctggctttcaagccaacagaaaacaagcggctgctttaagaatgatggccagcttttcaaccacgcctggcagggtggagatgaagaggacatttcactcactgcgtatgttgttgggatgttctttgaagctggggcggcattggacagtggtgtcactaatggctataatcatgcaattctagcttatgcttttgccttagctggaaaagagaagcaagtggaatctttactccaaaccctggatcaatctgccccaaaactaaataatgtcatctactgggaaagagaaaggaaacccaagacagaagaatttccatcctttattccctgggcaccttctgctcagactgagaagagttgctacgtgctgttggctgtcatttcccggaaaattcctgacctcacctatgctagtaagattgtgcagtggcttgcccaacggatgaattcccatggaggcttttcttccaaccaggatcaaaacactgtcacctttagcagtgaaggatccagtgagattttccaggttaacggtcataaccgcctactggtccaacgttcagaagtaacacaggcacctggagaatacacagtagatgtggaaggacacggttgtacatttatccaggccacccttaagtacaatgttctcctacctaagaaggcatctggattttctctttccttggaaatagtaaagaactactcttcgactgcttttgacctcacagtgaccctcaaatacactggaattcgcaataaatccagtatggtggttatagatgtaaaaatgctatcaggatttactccaaccatgtcatccattgaagagcttgaaaacaagggccaagtgatgaagactgaagtcaagaatgaccatgttcttttctacttggaaaatgtaggttttggtcgagcagacagtttccctttttctgttgagcagagcaaccttgtgttcaacattcagccagccccagccatggtctacgattattatgaaaaagaagaatatgccctagctttttacaacatcgacagtagttcagtttccgagtgagacaaagcaattactagaagagttggagaagcatttcttgtaacaaactgattcttctgtatcaaacctggaaaaaaatcatgaaccatctgacatcgtgaacagtctgcagtgggctatggtttcttgtcaagtcttatttccttatcatcccattaaatgttgtcattttgcaaaaaaaaaaaaaaaa

SEQ ID NO: 1106 - protein, 1411 aa, Homo sapiens
MYCFLRSAVSFFCLSLPRCWGYRCEPLCLAILLLQYVLLIPSVLQEGSLDKACAQLFNLTESVVLTVSLNYGEVQTKIFEENVTGENFFKCISFEVPQARSDPLAFITFSAKGATLNLEERRSVAIRSRENVVFVQTDKPTYKPGQYNKKPISHIMPVIAVTEQDPEGNRIQQWVNEESVGGILQLSFQLISEPILGWYEITVEMLNEKKTYHSFSVEEYVLPKFQMTVDAPENILVVDSEFKVNVCALYTYGEPVDGKVQLSVCRESTAYHSCAHLISSLCKNFTLGKDGCVSKFINTDAFELNREGYWSFLKVHALVTELTGSKYVYIDSSVVKISFENMDMSYKQGLPYFGQIKLLNPDNSPIPNEVVQLHLKDKIVGNYTTDVNGIAQFFLDTYTFTYPNITLKAAYKANENCQAHGWVLPQYPQPEYFAYRFYSKMNSFLKIVQEMEELRCNQQKRVLVHCILNMEDFEDKTYTADFNYLVISKGVIILHGQQKIEINENGRKGIFSISIDINPELAPSVHMLVYSLHPGGEMVTDSTQFQLRNVNIKFSNEQGLPGSNASLCLQAAPVLFCALRAVDRNVLLLKSEQQLSAESVYNMVPSIEPYGYFYHGLNLDDGKEDPCIPQRDMFYNGLYYTPVSNYGDGDIYNIVRNMGLKVFTNLHYRKPEVCVMERRLPLPKPLYLETENYGPMRSVPSRIASSGIRGENADYVEQAIIQTVRTNFPETWMWDLVSVDSSGSANLSFLIPDTITQWEASGFCVNGDVGFGISSTTTLEVSQPFFIEIASPFSVVQNEQFDLIVNVFSYRNTCVEISVQVEESQNYEANIHTLKINGSEVIQAGGRKTNVWTIIPKKLGKVNITVVAESKQSSACPNEGMEQQKLNWKDTVVQSFLVEPEGIEKERTQSFLICTEGAKASKQGVLDLPNDVVEGSARGFFTVVGDILGLALQNLVVLQMPYGSGEQNAALLASDTYVLDYLKSTEQLTEEVQSKAFFLLSNGYQRQLSFKNSDGSYSVFWQQSQKGSIWLSALTFKTLERMKKYVFIDENVQKQTLIWLSSQQKTSGCFKNDGQLFNHAWQGGDEEDISLTAYVVGMFFEAGAALDSGVTNGYNHAILAYAFALAGKEKQVESLLQTLDQSAPKLNNVIYWERERKPKTEEFPSFIPWAPSAQTEKSCYVLLAVISRKIPDLTYASKIVQWLAQRMNSHGGFSSNQDQNTVTFSSEGSSEIFQVNGHNRLLVQRSEVTQAPGEYTVDVEGHGCTFIQATLKYNVLLPKKASGFSLSLEIVKNYSSTAFDLTVTLKYTGIRNKSSMVVIDVKMLSGFTPTMSSIEELENKGQVMKTEVKNDHVLFYLENVGFGRADSFPFSVEQSNLVFNIQPAPAMVYDYYEKEEYALAFYNIDSSSVSE

SEQ ID NO: 1107 - DNA, 3445 bp, Homo sapiens
  CDS (117)..(2381)
caccgcgtgttcgcgcctggtagagatttctcgaagacaccagtgggcccgtgtggaaccaaacctgcgcgcgtggccgggccgtgggacaacgaggccgcggagacgaaggcgcaatggcgaggaagttatctgtaatcttgatcctgacctttgccctctctgtcacaaatccccttcatgaactaaaagcagctgctttcccccagaccactgagaaaattagtccgaattgggaatctggcattaatgttgacttggcaatttccacacggcaatatcatctacaacagcttttctaccgctatggagaaaataattctttgtcagttgaagggttcagaaaattacttcaaaatataggcatagataagattaaaagaatccatatacaccatgaccacgaccatcactcagaccacgagcatcactcagaccatgagcgtcactcagaccatgagcatcactcagagcacgagcatcactctgaccatgatcatcactctcaccataatcatgctgcttctggtaaaaataagcgaaaagctctttgcccagaccatgactcagatagttcaggtaaagatcctagaaacagccaggggaaaggagctcaccgaccagaacatgccagtggtagaaggaatgtcaaggacagtgttagtgctagtgaagtgacctcaactgtgtacaacactgtctctgaaggaactcactttctagagacaatagagactccaagacctggaaaactcttccccaaagatgtaagcagctccactccacccagtgtcacatcaaagagccgggtgagccggctggctggtaggaaaacaaatgaatctgtgagtgagccccgaaaaggctttatgtattccagaaacacaaatgaaaatcctcaggagtgtttcaatgcatcaaagctactgacatctcatggcatgggcatccaggttccgctgaatgcaacagagttcaactatctctgtccagccatcatcaaccaaattgatgctagatcttgtctgattcatacaagtgaaaagaaggctgaaatccctccaaagacctattcattacaaatagcctgggttggtggttttatagccatttccatcatcagtttcctgtctctgctgggggttatcttagtgcctctcatgaatcgggtgtttttcaaatttctcctgagtttccttgtggcactggccgttgggactttgagtggtgatgcttttttacaccttcttccacattctcatgcaagtcaccaccatagtcatagccatgaagaaccagcaatggaaatgaaaagaggaccacttttcagtcatctgtcttctcaaaacatagaagaaagtgcctattttgattccacgtggaagggtctaacagctctaggaggcctgtatttcatgtttcttgttgaacatgtcctcacattgatcaaacaatttaaagataagaagaaaaagaatcagaagaaacctgaaaatgatgatgatgtggagattaagaagcagttgtccaagtatgaatctcaactttcaacaaatgaggagaaagtagatacagatgatcgaactgaaggctatttacgagcagactcacaagagccctcccactttgattctcagcagcctgcagtcttggaagaagaagaggtcatgatagctcatgctcatccacaggaagtctacaatgaatatgtacccagagggtgcaagaataaatgccattcacatttccacgatacactcggccagtcagacgatctcattcaccaccatcatgactaccatcatattctccatcatcaccaccaccaaaaccaccatcctcacagtcacagccagcgctactctcgggaggagctgaaagatgccggcgtcgccactctggcctggatggtgataatgggtgatggcctgcacaatttcagcgatggcctagcaattggtgctgcttttactgaaggcttatcaagtggtttaagtacttctgttgctgtgttctgtcatgagttgcctcatgaattaggtgactttgctgttctactaaaggctggcatgaccgttaagcaggctgtcctttataatgcattgtcagccatgctggcgtatcttggaatggcaacaggaattttcattggtcattatgctgaaaatgtttctatgtggatatttgcacttactgctggcttattcatgtatgttgctctggttgatatggtacctgaaatgctgcacaatgatgctagtgaccatggatgtagccgctgggggtatttctttttacagaatgctgggatgcttttgggttttggaattatgttacttatttccatatttgaacataaaatcgtgtttcgtataaatttctagttaaggtttaaatgctagagtagcttaaaaagttgtcatagtttcagtaggtcatagggagatgagtttgtatgctgtactatgcagcgtttaaagttagtgggttttgtgatttttgtattgaatattgctgtctgttacaaagtcagttaaaggtacgttttaatatttaagttattctatcttggagataaaatctgtatgtgcaattcaccggtattaccagtttattatgtaaacaagagatttggcatgacatgttctgtatgtttcagggaaaaatgtctttaatgctttttcaagaactaacacagttattcctatactggattttaggtctctgaagaactgctggtgtttaggaataagaatgtgcatgaagcctaaaataccaagaaagcttatactgaatttaagcaaagaaataaaggagaaaagagaagaatctgagaattggggaggcatagattcttataaaaatcacaaaatttgttgtaaattagaggggagaaatttagaattaagtataaaaaggcagaattagtatagagtacattcattaaacatttttgtcaggattatttcccgtaaaaacgtagtgagcacttttcatatactaatttagttgtacatttaactttgtataatacagaaatctaaatatatttaatgaattcaagcaatatatcacttgaccaagaaattggaatttcaaaatgttcgtgcgggtatataccagatgagtacagtgagtagttttatgtatcaccagactgggttattgccaagttatatatcaccaaaagctgtatgactggatgttctggttacctggtttacaaaattatcagagtagtaaaactttgatatatatgaggatattaaaactacactaagtatcatttgattcgattcagaaagtactttgatatctctcagtgcttcagtgctatcattgtgagcaattgtcttttatatacggtactgtagccatactaggcctgtctgtggcattctctagatgtttcttttttacacaataaattccttatatcagcttg

SEQ ID NO: 1108 - protein, 755 aa, Homo sapiens
MARKLSVILILTFALSVTNPLHELKAAAFPQTTEKISPNWESGINVDLAISTRQYHLQQLFYRYGENNSLSVEGFRKLLQNIGIDKIKRIHIHHDHDHHSDHEHHSDHERHSDHEHHSEHEHHSDHDHHSHHNHAASGKNKRKALCPDHDSDSSGKDPRNSQGKGAHRPEHASGRRNVKDSVSASEVTSTVYNTVSEGTHFLETIETPRPGKLFPKDVSSSTPPSVTSKSRVSRLAGRKTNESVSEPRKGFMYSRNTNENPQECFNASKLLTSHGMGIQVPLNATEFNYLCPAIINQIDARSCLIHTSEKKAEIPPKTYSLQIAWVGGFIAISIISFLSLLGVILVPLMNRVFFKFLLSFLVALAVGTLSGDAFLHLLPHSHASHHHSHSHEEPAMEMKRGPLFSHLSSQNIEESAYFDSTWKGLTALGGLYFMFLVEHVLTLIKQFKDKKKKNQKKPENDDDVEIKKQLSKYESQLSTNEEKVDTDDRTEGYLRADSQEPSHFDSQQPAVLEEEEVMIAHAHPQEVYNEYVPRGCKNKCHSHFHDTLGQSDDLIHHHHDYHHILHHHHHQNHHPHSHSQRYSREELKDAGVATLAWMVIMGDGLHNFSDGLAIGAAFTEGLSSGLSTSVAVFCHELPHELGDFAVLLKAGMTVKQAVLYNALSAMLAYLGMATGIFIGHYAENVSMWIFALTAGLFMYVALVDMVPEMLHNDASDHGCSRWGYFFLQNAGMLLGFGIMLLISIFEHKIVFRINF

SEQ ID NO: 1109 - DNA, 3145 bp, Homo sapiens
  CDS (34)..(3045)
attttacttgctggatcttcagccttgacctgtatggcaaatggcttatgggaccgatccctgcccaagtgtttggctatatcctgtggacacccaggggtccctgccaacgccgtcctcactggagagctgtttacctatggcgccgtcgtgcactactcctgcagagggagcgagagcctcataggcaacgacacgagagtgtgccaggaagacagtcactggagcggggcactgccccactgcacaggaaataatcctggattctgtggtgatccggggaccccagcacatgggtctcggcttggtgatgactttaagacaaagagtcttctccgcttctcctgtgaaatggggcaccagctgaggggctcccctgaacgcacgtgtttgctcaatgggtcatggtcaggactgcagccggtgtgtgaggccgtgtcctgtggcaaccctggcacacccaccaacggaatgattgtcagtagtgatggcattctgttctccagctcggtcatctatgcctgctgggaaggctacaagacctcagggctcatgacacggcattgcacagccaatgggacctggacaggcactgctcccgactgcacaattataagttgtggggatccaggcacactagcaaatggcatccagtttgggaccgacttcaccttcaacaagactgtgagctatcagtgtaacccaggctatgtcatggaagcagtcacatccgccactattcgctgtaccaaagacggcaggtggaatccgagcaaacctgtctgcaaagccgtgctgtgtcctcagccgccgccggtgcagaatggaacagtggagggaagtgatttccgctggggctccagcataagttacagctgcatggacggttaccagctctctcactccgccatcctctcctgtgaaggtcgcggggtgtggaaaggagagatccccagtgtctgcctgtgttctgcggagaccctggcatccccgcagaagggcgacttagtgggaaaagtttcacctataagtccgaagtcttcttccagtgcaaatctccatttatactcgtgggatcctccagaagagtctgccaagctgacggcacgtggagcggcatacaacccacctgcattggtaataattatcatacagctctggggatacctgggagtatttggagatgaggacgcttcattccgaaattgggtcatttgtgattacatagaaagtgtttccatagacagttttctgtacaaggttggaagcacggtttttttcaggtgcagaaaaggctaccatattcaaggttccacgactcgcacctgccttgccaatttaacatggagtgggatacagaccgaatgtatacctcatgcctgcagacagccagaaaccccggcacacgcggatgtgagagccatcgatcttcctactttcggctacaccttagtgtacacctgccatccaggctttttcctcgcagggggatctgagcacagaacatgtaaagcagacatgaaatggacaggaaagtcgcctgtgtgtaaaattccttcagatgtctttttcgtcaattcactgtggaaggggtattatgaatatttagggaaaagacaacccgccactctaactgttgactggttcaatgcaacaagcagtaaggtgaatgccaccttcagcgaagcctcgccagtggagctgaagttgacaggcatttacaagaaggaggaggcccacttactcctgaaagcttttcaaattaaaggccaggcagatatttttgtaagcaagttcgaaaatgacaactggggactagatggttatgtgtcatctggacttgaaagaggaggatttacttttcaaggtgacattcatggaaaagactttggaaaatttaagctagaaaggcaaggatgggtcacaatattcttgagcctatttcttcatcttaaatctcagtatagaagttcccaaggttgttacgagattgagaggccacatcctttaaacccagatcaagactcttccagtcattaccacggcaccagcagtggctctgtggcggctgccattctggttcctttctttgctctaattttatcagggtttgcattttacctctacaaacacagaacgagaccaaaagttcaatacaatggctatgctgggcatgaaaacagcaatggacaagcatcgtttgaaaaccccatgtatgatacaaacttaaaacccacagaagccaaggctaaaaccacacacgggctgctcacgtctctggactccaagagaaagatggttataaccctggcagagtctttacccgccctgcgaacctgcctgttgatctgcttcccactcctctttagacttgctcgtgaatcttcagcacagccatttgttttgagtattcaaacacataaaaagatatctggcaacttcccacttcttatgacttctcagacaccttgtaacggagcttcccttggaggtggacaaacttctcactcacaagagagacggagagcaacagagagagatgggcagggattgattcgaggattggctgactcgattatggagggtgagaagtcccaggacaggccgtctgcaaggcgtaaacccagggaagctgctggtatggctcggttcaagtccaaaggcctcagcaccaaggaaaccaaggtgataactctcagttcgggtcaaagtcctgggagtctgcaaggcctctcattgagtaagtctcacaagatccgatggttttataaagggcagttcccctgcacaagctctcttctctgccaccacgcgtttgctgttcattcacctttcaccatgattgtgaggcctcccagccatgtggaactgtgcaaagaggatgttcaaagggcatcttggaccaggaggaggaagcccattgtgaggatggcaaagaacaataaatggaaggcccgtggaaccctgagcggctgccccatcactgtcctctccatcctttccatgcttcccatggtgcatggctctcaggctctccaagcaccatgagctcctggcgcgtatggcctggcccctgagtgtggagtctgtggactttaaatgtgcctttactcagccagcatctccctggctgggtgcgatgttg

SEQ ID NO: 1110 - protein, 1004 aa, Homo sapiens [sequence omitted]

SEQ ID NO: 1111 - DNA, 10989 bp, Homo sapiens
  CDS (286)..(10986)
ccttcctgcccggctcggccggcgctcgtccccggccccggccccgccagcccgggtctccgcgctcggagcagctcagccctgcagtggctcgggacccgatgctatgagagggaagcgagccgggcgcccagaccttcaggaggcgtcggatgcgcggcgggtcttgggaccgggctctctctccggctcgccttgccctcgggtgattatttggctccgctcatagccctgccttcctcggaggagccatcggtgtcgcgtgcgtgtggagtatctgcagacatgactgcgtggaggagattccagtcgctgctcctgcttctcgggctgctggtgctgtgcgcgaggctcctcactgcagcgaagggtcagaactgtggaggcttagtccagggtcccaatggcactattgagagcccagggtttcctcacgggtatccgaactatgccaactgcacctggatcatcatcacgggcgagcgcaataggatacagttgtccttccatacctttgctcttgaagaaaattttgatattttatcagtttacgatggacagcctcaacaagggaatttaaaagtgagattatcgggatttcagctgccctcctctatagtgagtacaggatctatcctcactctgtggttcacgacagacttcgctgtgagtgcccaaggtttcaaagcattatatgaagttttacctagccacacttgtggaaatcctggagaaatcctgaaaggagttctgcatggaacgagattcaacataggagacaaaatccggtacagctgcctccctggctacatcttggaaggccacgccatcctgacctgcatcgtcagcccaggaaatggtgcatcgtgggacttcccagctcccttttgcagagctgagggagcctgcggaggaaccttacgcgggaccagcagctccatctccagcccgcacttcccttcagagtacgagaacaacgcggactgcacctggaccattctggctgagcccggggacaccattgcgctggtcttcactgactttcagctagaagaaggatatgatttcttagagatcagtggcacggaagctccatccatatggctaactggcatgaacctcccctctccagttatcagtagcaagaattggctacgactccatttcacctctgacagcaaccaccgacgcaaaggatttaacgctcagttccaagtgaaaaaggcgattgagttgaagtcaagaggagtcaagatgctgcccagcaaggatggaagccataaaaactctgtcttgagccaaggaggtgttgcattggtctctcacatgtgtctagatcctgggattccagaaaatggtagaagagcaggttccgacttcagtagggttggtgcaaatgtacagttttcatgtgaggacaattacgtgctccagggatctaaaagcatcacctgtcagagagttacagagacgctcgctgcttggagtgaccacaggcccatctgccgagcgagaacatgtggatccaatctgcgtgggcccagcggcgtcattacctcccctaattatccggttcagtatgaagataatgcacactgtgtgtgggtcatcaccaccaccgacccggacaaggtcatcaagcttgcctttgaagagtttgagctggagcgaggctatgacaccctgacggttggtgatgctgggaaggtgggagacaccagatcggtcttgtacgtgctcacgggatccagtgttcctgacctcattgtgagcatgagcaaccagatgtggctacatctgcagtcggatgatagcattggctcacctgggtttaaagctgtttaccaagaaattgaaaagggagggtgtggggatcctggaatccccgcctatgggaagcggacgggcagcagtttcctccatggagatacactcacctttgaatgcccggcggcctttgagctggtgggggagagagttatcacctgtcagcagaacaatcagtggtctggcaacaagcccagctgtgtattttcatgtttcttcaactttacggcatcatctgggattattctgtcaccaaattatccagaggaatatgggaacaacatgaactgtgtctggttgattatctcggagccaggaagtcgaattcacctaatctttaatgattttgatgttgagcctcaatttgactttctcgcggtcaaggataatggcatttctgacataactgtcctgggtactttttctggcaatgaagtgccttcccagctggccagcagtgggcatatagttcgcttggaatttcagtctgaccattccactactggcagagggttcaacatcacttacaccacatttggtcagaatgagtgccatgatcctggcattcctataaacggacgacgttttggtgacaggtttctactcgggagctcggtttctttccactgtgatgatggctttgtcaagacccagggatccgagtccattacctgcatactgcaagacgggaacgtggtctggagctccaccgtgccccgctgtgaagctccatgtggtggacatctgacagcgtccagcggagtcattttgcctcctggatggccaggatattataaggattctttacattgtgaatggataattgaagcaaaaccaggccactctatcaaaatgacttttgacagatttcagacagaggtcaattatgacaccttggaggtcagagatgggccagccagttcgtccccactgatcggcgagtaccacggcacccaggcaccccagttcctcatcagcaccgggaacttcatgtacctgctgttcaccactgacaacagccgctccagcatcggcttcctcatccactatgagagtgtgacgcttgagtcggattcctgcctggacccgggcatccctgtgaacggccatcgccacggtggagactttggcatcaggtccacagtgactttcagctgtgacccggggtacacactaagtgacgacgagcccctcgtctgtgagaggaaccaccagtggaaccacgccttgcccagctgcgacgctctatgtggaggctacatccaagggaagagtggaacagtcctttctcctgggtttccagatttttatccaaactctctaaactgcacgtggaccattgaagtgtctcatgggaaaggagttcaaatgatctttcacacctttcatcttgagagttcccacgactatttactgatcacagaggatggaagtttttccgagcccgttgccaggctcaccgggtcggtgttgcctcatacgatcaaggcaggcctgtttggaaacttcactgcccagcttcggtttatatcagacttctcaatttcgtacgagggcttcaatatcacattttcagaatatgacctggagccatgtgatgatcctggagtccctgccttcagccgaagaattggttttcactttggtgtgggagactctctgacgttttcctgcttcctgggatatcgtttagaaggtgccaccaagcttacctgcctgggtgggggccgccgtgtgtggagtgcacctctgccaaggtgtgtggccgaatgtggagcaagtgtcaaaggaaatgaaggaacattactgtctccaaattttccatccaattatgataatacccatgagtgtatctataaaatagaaacagaagccggcaagggcatccaccttagaacacgaagcttccagctgtttgaaggagatactctaaaggtatatgatggaaaagacagttcctcacgtccactgggcacgttcactaaaaatgaacttctggggctgatcctaaacagcacatccaatcacctatggctagagttcaacaccaatggatctgacaccgaccaaggttttcaactcacctataccagttttgatctggtaaaatgtgaggatccgggcatccctaactacggctataggatccgtgatgaaggccactttaccgacactgtagttctgtacagttgcaacccggggtacgccatgcatggcagcaacaccctgacctgtttgagtggagacaggagagtgtgggacaaaccactaccttcgtgcatagcggaatgtggtggtcagatccatgcagccacatcaggacgaatattgtcccctggctatccagctccgtatgacaacaacctccactgcacctggattatagaggcagacccaggaaagaccattagcctccatttcattgttttcgacacggagatggctcacgacatcctcaaggtctgggacgggccggtggacagtgacatcctgctgaaggagtggagtggctccgcccttccggaggacatccacagcaccttcaactcactcaccctgcagttcgacagcgacttcttcatcagcaagtctggcttctccatccagttctccacctcaattgcagccacctgtaacgatccaggtatgccccaaaatggcacccgctatggagacagcagagaggctggagacaccgtcacattccagtgtgaccctggctatcagctccaaggacaagccaaaatcacctgtgtgcagctgaataaccggttcttttggcaaccagaccctcctacatgcatagctgcttgtggagggaatctgacgggcccagcaggtgttattttgtcacccaactacccacagccgtatcctcctgggaaggaatgtgactggagagtaaaagtgaacccggactttgtcatcgccttgatattcaaaagtttcaacatggagcccagctatgacttcctacacatctatgaaggggaagattccaacagccccctcattgggagttaccagggctctcaggccccagaaagaatagagagtagcggaaacagcctgtttctggcatttcggagtgatgcctccgtgggcctttcagggttcgccattgaatttaaagagaaaccacgggaagcttgttttgacccaggaaatataatgaatgggacaagagttggaacagacttcaagcttggctccaccatcacctaccagtgtgactctggctataagattcttgacccctcatccatcacctgtgtgattggggctgatgggaaaccctcctgggaccaagtgctgccctcctgcaatgctccctgtggaggccagtacacgggatcagaaggggtagttttatcaccaaactacccccataattacacagctggtcaaatatgcctctattccatcacggtaccaaaggaattcgtggtctttggacagtttgcctatttccagacagccctgaatgatttggcagaattatttgatggaacccatgcacaggccagacttctcagctcactctcggggtctcactcaggggaaacattgcccttggctacgtcaaatcaaattctgctccgattcagtgcaaagagcggtgcctctgcccgcggcttccacttcgtgtatcaagctgttcctcgtaccagtgacacccaatgcagctctgtccccgagcccagatacggaaggagaattggttctgagttttctgccggctccatcgtccgattcgagtgcaacccgggatacctgcttcagggttccacggcgctccactgccagtccgtgcccaacgccttggcacagtggaacgacacgatccccagctgtgtggtaccctgcagtggcaatttcactcaacgaagaggtacaatcctgtcccccggctaccctgagccatacggaaacaacttgaactgtatatggaagatcatagttacggagggctcgggaattcaagatccaagtgatcagttttgccacggagcagaactgggacttccctttgagatccacgatggtggggatgtgaccgcacccagactgggaagcttctcaggcaccacagtaccggcactgctgaacagtacttccaaccaactctacctgcatttccagtctgacattagtgtggcagctgctggtttccacctggaatacaaaactgtaggtcttgctgcatgccaagaaccagccctccccagcaacagcatcaaaatcggagatcggtacatggtgaacgacgtgctctccttccagtgcgagcccgggtacaccctgcagggccgttcccacatttcctgtatgccagggaccgttcgccgttggaactatccgtctcccctgtgcattgcaacctgtggagggacgctgagcaccttgggtggtgtgatcctgagccccggcttcccaggttcttaccccaacaacttagactgcacctggaggatctcattacccatcggctatggtgcacatattcagtttctgaatttttctaccgaagctaatcatgacttccttgaaattcaaaatggaccttaccacaccagccccatgattggacaatttagcggcacggatctccccgcggccctgctgagcacaacgcatgaaaccctcatccacttttatagtgaccattcgcaaaaccggcaaggatttaaacttgcttaccaagcctatgaattacagaactgtccagatccacccccatttcagaatgggtacatgatcaactcggattacagcgtggggcaatcagtatctttcgagtgttatcctgggtacattctaataggccatcctgtcctcacttgtcagcatgggatcaacagaaactggaactacccttttccaagatgtgatgccccttgtgggtacaacgtaacttctcagaacggcaccatctactcccctggctttcctgatgagtatccgatcctgaaggactgcatttggctcatcacggtgcctccagggcacggagtttacatcaacttcaccctgttacagacggaagctgtcaacgattacattgctgtttgggacggtcccgatcagaactcaccccagctgggagttttcagtggcaacacagccctcgaaacggcgtatagctccaccaaccaagtcctgctcaagttccacagcgacttttcaaatggaggcttctttgtcctcaatttccacgcatttcagctcaagaaatgtcaacctcccccagcggttccacaggcagaaatgcttactgaggatgatgatttcgaaataggagattttgtgaagtaccagtgccaccccgggtacaccttggtggggaccgacattctgacttgcaagctcagttcccagttgcagtttgagggttctctcccaacatgtgaagcacaatgcccagcaaatgaagtccggactggatcatcgggagtcattctcagtccagggtatccgggtaattattttaactcccagacttgctcttggagtattaaagtggaaccaaactacaacattaccatctttgtggacacatttcaaagtgaaaagcagtttgatgcactggaagtgtttgatggttcttctgggcaaagtcctctgctagtagtcttaagtgggaatcatactgaacaatcaaattttacaagcaggagtaatcagttatatctccgctggtccactgaccatgccaccagtaagaaaggattcaagattcgctatgcagcaccttactgcagtttgacccaccccctgaagaatgggggtattctaaacaggactgcaggagcggttggaagcaaagtgcattatttttgcaagcctggataccgaatggtcggccacagcaatgcaacctgtagacgaaacccacttggcatgtaccagtgggactccctcacgccactctgccaggctgtgtcctgtggaatcccagaatccccaggaaacggttcatttaccgggaacgagttcactttggacagtaaagtggtctatgaatgtcatgaaggcttcaagcttgaatccagccagcaagcaacagccgtgtgtcaagaagatgggctgtggagtaacaaggggaagccgcccatgtgtaagccggtcgcttgccccagcattgaagctcagctctcagaacatgtcatctggaggctggtttcaggatccttgaatgagtacggtgctcaagtattgctgagctgcagtcctggttactacttagaaggctggaggctcctgcggtgccaggccaatgggacgtggaacataggagatgagaggccaagctgtcgagttatctcgtgtggaagcctttcctttcccccaaatggcaacaagattggaacgttgacagtttatggggccacagctatatttacgtgcaacaccggctacacgcttgtggggtctcatgtcagagagtgcttggcaaatgggctctggagcggcagcgaaactcgatgtttagctggccactgcggttccccagacccgattgtgaacggtcacattagtggagatggcttcagttacagagacacggtggtttaccagtgcaatcctggtttccggcttgtgggaacttccgtgaggatatgcctgcaagaccacaagtggtctggacaaacgcctgtctgtgtccgtatcacatgtggtcaccctggaaaccctgcccacggattcactaatggcagtgagttcaacctgaatgatgtcgtgaatttcacctgcaacacgggctatttgctgcagggcgtgtctcgagcccagtgtcggagcaacggccagtggagtagccctctgcccacgtgtcgagtggtgaactgttctgatccaggctttgtggaaaatgccattcgtcacgggcaacagaacttccctgagagttttgagtatggaatgagtatcctgtaccattgcaagaagggattttacttgctgggatcttcagccttgacctgtatggcaaatggcttatgggaccgatccctgcccaagtgtttggctatatcgtgtggacacccaggggtccctgccaacgccgtcctcactggagagctgtttacctatggcgccgtcgtgcactactcctgcagagggagcgagagcctcataggcaacgacacgagagtgtgccaggaagacagtcactggagcggggcactgccccactgcacaggaaataatcctggattctgtggtgatccggggaccccagcacatgggtctcggcttggtgatgactttaagacaaagagtcttctccgcttctcctgtgaaatggggcaccagctgaggggctcccctgaacgcacgtgtttgctcaatgggtcatggtcaggactgcagccggtgtgtgaggccgtgtcctgtggcaaccctggcacacccaccaacggaatgattgtcagtagtgatggcattctgttctccagctcggtcatctatgcctgctgggaaggctacaagacctcagggctcatgacacggcattgcacagccaatgggacctggacaggcactgctcccgactgcacagttataagttgtggggatccaggcacactagcaaatggcatccagtttgggaccgacttcaccttcaacaagactgtgagctatcagtgtaacccaggctatgtcatggaagcagtcacatccgccactattcgctgtaccaaagacggcaggtggaatccgagcaaacctgtctgcaaagccgtgctgtgtcctcagccgccgccggtgcagaatggaacagtggagggaagtgatttccgctggggctccagcataagttacagctgcatggacggttaccagctctctcactccgccatcctctcctgtgaaggtcgcggggtgtggaaaggagagatcccccagtgtctcgctgtgttctgcggagaccctggcatccccgcagaagggcgacttagtgggaaaagtttcacctataagtccgaagtcttcttccagtgcaaatctccatttatactcgtgggatcctccagaagagtctgccaagctgacggcacgtggagcggcatacaacccacctgcattggtgatcctgctcataacacctgcccagaccctggtacgccacactttggaatacagaatagctccagaggctatgaggttggaagcacggtttttttcaggtgcagaaaaggctaccatattcaaggttccacgactcgcacctgccttgccaatttaacatggagtgggatacagaccgaatgtatacgtcatgcctgcagacagccagaaaccccggcacacgcggatgtgagagccatcgatcttcctactttcggctacaccttagtgtacacctgccatccaggctttttcctcgcagggggatctgagcacagaacatgtaaagcagacatgaaatggacaggaaagtcgcctgtgtgtaaaagtaaaggagtgagagaagttaatgaaacagttactaaaactccagttccttcagatgtctttttcgtcaattcactgtggaaggggtattatgaatatttagggaaaagacaacccgccactctaactgttgactggttcaatgcaacaagcagtaaggtgaatgccaccttcagcgaagcctcgccagtggagctgaagttgacaggcatttacaagaaggaggaggcccacttactcctgaaagcttttcaaattaaaggccaggcagatatttttgtaagcaagttcgaaaatgacaactggggactagatggttatgtgtcatctggacttgaaagaggaggatttacttttcaaggtgacattcatggaaaagactttggaaaatttaagctagaaaggcaagatcctttaaacccagatcaagactcttccagtcattaccacggcaccagcagtggctctgtggcggctgccattctggttcctttctttgctctaattttatcagggtttgcattttacctctacaaacacagaacgagaccaaaagttcaatacaatggctatgctgggcatgaaaacagcaatggacaagcatcgtttgaaaaccccatgtatgatacaaacttaaaacccacagaagccaaggctgtgaggtttgacacaactctgaacacagtctgtacagtggtatga

SEQ ID NO: 1112 - protein, 3567 aa, Homo sapiens
MTAWRRFQSLLLLLGLLVLCARLLTAAKGQNCGGLVQGPNGTIESPGFPHGYPNYANCTWIIITGERNRIQLSFHTFALEENFDILSVYDGQPQQGNLKVRLSGFQLPSSIVSTGSILTLWFTTDFAVSAQGFKALYEVLPSHTCGNPGEILKGVLHGTRFNIGDKIRYSCLPGYILEGHAILTCIVSPGNGASWDFPAPFCRAEGACGGTLRGTSSSISSPHFPSEYENNADCTWTILAEPGDTIALVFTDFQLEEGYDFLEISGTEAPSIWLTGMNLPSPVISSKNWLRLHFTSDSNHRRKGFNAQFQVKKAIELKSRGVKMLPSKDGSHKNSVLSQGGVALVSHMCLDPGIPENGRRAGSDFSRVGANVQFSCEDNYVLQGSKSITCQRVTETLAAWSDHRPICRARTCGSNLRGPSGVITSPNYPVQYEDNAHCVWVITTTDPDKVIKLAFEEFELERGYDTLTVGDAGKVGDTRSVLYVLTGSSVPDLIVSMSNQMWLHLQSDDSIGSPGFKAVYQEIEKGGCGDPGIPAYGKRTGSSFLHGDTLTFECPAAFELVGERVITCQQNNQWSGNKPSCVFSCFFNFTASSGIILSPNYPEEYGNNMNCVWLIISEPGSRIHLIFNDFDVEPQFDFLAVKDNGISDITVLGTFSGNEVPSQLASSGHIVRLEFQSDHSTTGRGFNITYTTFGQNECHDPGIPINGRRFGDRFLLGSSVSFHCDDGFVKTQGSESITCILQDGNVVWSSTVPRCEAPCGGHLTASSGVILPPGWPGYYKDSLHCEWIIEAKPGHSIKMTFDRFQTEVNYDTLEVRDGPASSSPLIGEYHGTQAPQFLISTGNFMYLLFTTDNSRSSIGFLIHYESVTLESDSCLDPGIPVNGHRHGGDFGIRSTVTFSCDPGYTLSDDEPLVCERNHQWNHALPSCDALCGGYIQGKSGTVLSPGFPDFYPNSLNCTWTIEVSHGKGVQMIFHTFHLESSHDYLLITEDGSFSEPVARLTGSVLPHTIKAGLFGNFTAQLRFISDFSISYEGFNITFSEYDLEPCDDPGVPAFSRRIGFHFGVGDSLTFSCFLGYRLEGATKLTCLGGGRRVWSAPLPRCVAECGASVKGNEGTLLSPNFPSNYDNTHECIYKIETEAGKGIHLRTRSFQLFEGDTLKVYDGKDSSSRPLGTFTKNELLGLILNSTSNHLWLEFNTNGSDTDQGFQLTYTSFDLVKCEDPGIPNYGYRIRDEGHFTDTVVLYSCNPGYAMHGSNTLTCLSGDRRVWDKPLPSCIAECGGQIHAATSGRILSPGYPAPYDNNLHCTWIIEADPGKTISLHFIVFDTEMAHDILKVWDGPVDSDILLKEWSGSALPEDIHSTFNSLTLQFDSDFFISKSGFSIQFSTSIAATCNDPGMPQNGTRYGDSREAGDTVTFQCDPGYQLQGQAKITCVQLNNRFFWQPDPPTCIAACGGNLTGPAGVILSPNYPQPYPPGKECDWRVKVNPDFVIALIFKSFNMEPSYDFLHIYEGEDSNSPLIGSYQGSQAPERIESSGNSLFLAFRSDASVGLSGFAIEFKEKPREACFDPGNIMNGTRVGTDFKLGSTITYQCDSGYKILDPSSITCVIGADGKPSWDQVLPSCNAPCGGQYTGSEGVVLSPNYPHNYTAGQICLYSITVPKEFVVFGQFAYFQTALNDLAELFDGTHAQARLLSSLSGSHSGETLPLATSNQILLRFSAKSGASARGFHFVYQAVPRTSDTQCSSVPEPRYGRRIGSEFSAGSIVRFECNPGYLLQGSTALHCQSVPNALAQWNDTIPSCVVPCSGNFTQRRGTILSPGYPEPYGNNLNCIWKIIVTEGSGIQDPSDQFCHGAELGLPFEIHDGGDVTAPRLGSFSGTTVPALLNSTSNQLYLHFQSDISVAAAGFHLEYKTVGLAACQEPALPSNSIKIGDRYMVNDVLSFQCEPGYTLQGRSHISCMPGTVRRWNYPSPLCIATCGGTLSTLGGVILSPGFPGSYPNNLDCTWRISLPIGYGAHIQFLNFSTEANHDFLEIQNGPYHTSPMIGQFSGTDLPAALLSTTHETLIHFYSDHSQNRQGFKLAYQAYELQNCPDPPPFQNGYMINSDYSVGQSVSFECYPGYILIGHPVLTCQHGINRNWNYPFPRCDAPCGYNVTSQNGTIYSPGFPDEYPILKDCIWLITVPPGHGVYINFTLLQTEAVNDYIAVWDGPDQNSPQLGVFSGNTALETAYSSTNQVLLKFHSDFSNGGFFVLNFHAFQLKKCQPPPAVPQAEMLTEDDDFEIGDFVKYQCHPGYTLVGTDILTCKLSSQLQFEGSLPTCEAQCPANEVRTGSSGVILSPGYPGNYFNSQTCSWSIKVEPNYNITIFVDTFQSEKQFDALEVFDGSSGQSPLLVVLSGNHTEQSNFTSRSNQLYLRWSTDHATSKKGFKIRYAAPYCSLTHPLKNGGILNRTAGAVGSKVHYFCKPGYRMVGHSNATCRRNPLGMYQWDSLTPLCQAVSCGIPESPGNGSFTGNEFTLDSKVVYECHEGFKLESSQQATAVCQEDGLWSNKGKPPMCKPVACPSIEAQLSEHVIWRLVSGSLNEYGAQVLLSCSPGYYLEGWRLLRCQANGTWNIGDERPSCRVISCGSLSFPPNGNKIGTLTVYGATAIFTCNTGYTLVGSHVRECLANGLWSGSETRCLAGHCGSPDPIVNGHISGDGFSYRDTVVYQCNPGFRLVGTSVRICLQDHKWSGQTPVCVRITCGHPGNPAHGFTNGSEFNLNDVVNFTCNTGYLLQGVSRAQCRSNGQWSSPLPTCRVVNCSDPGFVENAIRHGQQNFPESFEYGMSILYHCKKGFYLLGSSALTCMANGLWDRSLPKCLAISCGHPGVPANAVLTGELFTYGAVVHYSCRGSESLIGNDTRVCQEDSHWSGALPHCTGNNPGFCGDPGTPAHGSRLGDDFKTKSLLRFSCEMGHQLRGSPERTCLLNGSWSGLQPVCEAVSCGNPGTPTNGMIVSSDGILFSSSVIYACWEGYKTSGLMTRHCTANGTWTGTAPDCTVISCGDPGTLANGIQFGTDFTFNKTVSYQCNPGYVMEAVTSATIRCTKDGRWNPSKPVCKAVLCPQPPPVQNGTVEGSDFRWGSSISYSCMDGYQLSHSAILSCEGRGVWKGEIPQCLAVFCGDPGIPAEGRLSGKSFTYKSEVFFQCKSPFILVGSSRRVCQADGTWSGIQPTCIGDPAHNTCPDPGTPHFGIQNSSRGYEVGSTVFFRCRKGYHIQGSTTRTCLANLTWSGIQTECIRHACRQPETPAHADVRAIDLPTFGYTLVYTCHPGFFLAGGSEHRTCKADMKWTGKSPVCKSKGVREVNETVTKTPVPSDVFFVNSLWKGYYEYLGKRQPATLTVDWFNATSSKVNATFSEASPVELKLTGIYKKEEAHLLLKAFQIKGQADIFVSKFENDNWGLDGYVSSGLERGGFTFQGDIHGKDFGKFKLERQDPLNPDQDSSSHYHGTSSGSVAAAILVPFFALILSGFAFYLYKHRTRPKVQYNGYAGHENSNGQASFENPMYDTNLKPTEAKAVRFDTTLNTVCTVV

SEQ ID NO: 1113 - DNA, 898 bp, Homo sapiens
  CDS (2)..(898)
caccagatcttgtggacacccaggggtccctgccaacgccgtcctcactggagagctgtttacctatggcgccgtcgtgcactactcctgcagagggagcgagagcctcataggcaacgacacgagagtgtgccaggaagacagtcactggagcggggcactgccccactgcacaggaaataatcctggattctgtggtgatccggggaccccagcacatgggtctcggcttggtgatgactttaagacaaagagtcttctccgcttctcctgtgaaatggggcaccagctgaggggctcccctgaacgcacgtgtttgctcaatgggtcatggtcaggactgcagccggtgtgtgaggccgtgtcctgtggcaaccctggcacacccaccaacggaatgattgtcagtagtgatggcattctgttctccagctcggtcatctatgcctgctgggaaggctacaagacctcagggctcatgacacggcattgcacagccaatgggacctggacaggcactgctcccgactgcacaattataagttgtggggatccaggcacactagcaaatggcatccagtttgggaccgacttcaccttcaacaagactgtgagctatcagtgtaacccaggctatgtcatggaagcagtcacatccgccactattcgctgtaccaaagacggcaggtggaatccgagcaaacctgtctgcaaagccgtgctgtgtcctcagccgccgccggtgcagaatggaacagtggagggaagtgatttccgctggggctccagcataagttacagctgcatggacggttaccagctctctcactccgccatcctctcctgtgaaggtcgcggggtgtggaaaggagagatccccagtgtctgcctcgagggc

SEQ ID NO: 1114 - protein, 299 aa, Homo sapiens
TRSCGHPGVPANAVLTGELFTYGAVVHYSCRGSESLIGNDTRVCQEDSHWSGALPHCTGNNPGFCGDPGTPAHGSRLGDDFKTKSLLRFSCEMGHQLRGSPERTCLLNGSWSGLQPVCEAVSCGNPGTPTNGMIVSSDGILFSSSVIYACWEGYKTSGLMTRHCTANGTWTGTAPDCTIISCGDPGTLANGIQFGTDFTFNKTVSYQCNPGYVMEAVTSATIRCTKDGRWNPSKPVCKAVLCPQPPPVQNGTVEGSDFRWGSSISYSCMDGYQLSHSAILSCEGRGVWKGEIPSVCLEG

SEQ ID NO: 1115 - DNA, 3019 bp, Homo sapiens
  CDS (184)..(2613)
ctgccaggctgtgtcctgtggaatcccagaatccccaggaaacggttcattaccgggaacgagttcactttggacagtaaagtggtctatgaatgtcatgagggcttcaagcttgaatccagccagcaagcaacagccgtgtgtcaagaagatgggctgtggagtaacaaggggaagccgcccatgtgtaagccggtcgcttgccccagcattgaagctcagctctcagaacatgtcatctggaggctggtttcaggatccttgaatgagtacggtgctcaagtattgctgagctgcagtcctggttactacttagaaggctggaggctcctgcggtgccaggccaatgggacgtggagcataggagatgagaggccaagctgtcgagttatctcgtgtggaagcctttcctttcccccaaatggcaacaagattggaacgttgacagtttatggggccacagctatatttacgtgcaacaccggctacacgcttgtggggtctcatgtcagagagtgcttggcaaatgggctctggagcggcagcgaaactcgatgtctggctggccactgcggttccccagacccgattgtgaacggtcacattagtggagatggcttcagttacagagacacggtggtttaccagtgcaatcctggtttccggcttgtgggaacttccgtgaggatatgcctgcaagaccacaagtggtctggacaaacgcctgtctgtgtcgccatcacatgtggtcaccctggaaaccctgcccacggattcactaatggcagtgagttcaacctgaatgatgtcgtgaatttcacctgcaacacgggctatttgctgcagggcgtgtctcgagcccagtgtcggagcaacggccagtggagtagccctctgcccacgtctcgacacgtgggcagagggctactccactggcggttgctccgacacggggctccgagacacgccctgcagcaaatagcccgtgttgcaggtgaaattcacgacatcattattttacttgctggatcttcagccttgacctgtatggcaaatggcttatgggaccgatccctgcccaagtgtttggctatatcgtgtggacacccaggggtccctgccaacgccgtcctcactggagagctgtttacctatggcgccgtcgtgcactactcctgcagagggagcgagagcctcataggcaacgacacgagagtgtgccaggaagacagtcactggagcggggcactgccccactgcacaggtaataatcctggattctgtggtgatccggggaccccagcacatgggtctcggcttggtgatgactttaagacaaagagtcttctccgcttctcctgtgaaatggggcaccagctgaggggctcccctgaacgcacgtgtttgctcaatgggtcatggtcaggactgcagtcggtgtgtgaggccgtgtcctgtggcaaccctggcacacccaccaacggaatgattgtcagtagtgatggcattctgttctccagctcggtcatctatgcctgctgggaaggctacaagacctcagggctcatgacacggcattgcacagccaatgggacctggacaggcactgctcccgactgcttagttataagttgtggggatccaggcacactagcaaatggcatccagtttgggaccgacttcaccttcaacaagactgtgagctatcagtgtaacccaggctatgtcatggaagcagtcacatccgccactattcgctgtaccaaagacggcaggtggaatccgagcaaacctgtctgcaaaggtttgctgtgtcctcagccgccgccggtgcagaatggaacagtggagggaagtgatttccgctggggctccagcataagttacagctgcatggacggttaccagctctctcactccgccatcctctcctgtgaaggtcgcggggtgtggaaaggagagatcccccagtgtctgcctgtgttctgcggagaccctggcatccccgcagaggggcgacttagtgggaaaagtttcacctataagtccgaagtcttcttccagtgcaaatctccatttatactcgtgggatcctccagaagagtctgccaagctgacggcacgtggagcggcatacaacccacctgcattgatcctgctcataacacctgcccagaccctggtacgccacactttggaatacagaatagctccagaggctatgaggttggaagcacggtttttttcaggtgcagaaaaggctaccatattcaaggttccacgactcgcacctgccttgccaatttaacatggagtgggatacagaccgaatgtatacctcatgcctgcagacagccagaaaccccggcacacgcggatgtgagagccatcgatcttcctactttcggctacaccttagtgtacacctgccatccaggctttttcctcgcagggggatctgagcacagaacatgtaaagcagacatgaaatggacaggaaagtcgcctgtgtgtaaaagtaagtcattgatcaaggagtggcatacttttccaaagagcaagggaaaggatcagctgcccatcaggctagtgtccacgtgtgagacccataagtaagagcatgaggctgcagcatcgccacctgcctcagtcgtgcttcatgtgcgtgagctgtgtgtgtgaacgtgtgtatcctcagtgtttgatgcaatggtggcatagctaaatatatagtacaattagtatgcaattagtacataataaaatgattgcattatttcaagccaaaagagaaaagctatttggttaaagaaaagcattctgagttaaaaggaaaataatacttggtatagtttcaggaaaagtagttcttagagatgaaaatgaataaaggtcaccaagtatccgagaataggtaaatgaaactctgtcttatttttaagaccacatgctgtttgtggtaaaacctcagtttatgtgtccctgacattgattctgctttttaaaattacaaaagcaa

SEQ ID NO: 1116 - protein, 810 aa, Homo sapiens
MCKPVACPSIEAQLSEHVIWRLVSGSLNEYGAQVLLSCSPGYYLEGWRLLRCQANGTWSIGDERPSCRVISCGSLSFPPNGNKIGTLTVYGATAIFTCNTGYTLVGSHVRECLANGLWSGSETRCLAGHCGSPDPIVNGHISGDGFSYRDTVVYQCNPGFRLVGTSVRICLQDHKWSGQTPVCVAITCGHPGNPAHGFTNGSEFNLNDVVNFTCNTGYLLQGVSRAQCRSNGQWSSPLPTSRHVGRGLLHWRLLRHGAPRHALQQIARVAGEIHDIIILLAGSSALTCMANGLWDRSLPKCLAISCGHPGVPANAVLTGELFTYGAVVHYSCRGSESLIGNDTRVCQEDSHWSGALPHCTGNNPGFCGDPGTPAHGSRLGDDFKTKSLLRFSCEMGHQLRGSPERTCLLNGSWSGLQSVCEAVSCGNPGTPTNGMIVSSDGILFSSSVIYACWEGYKTSGLMTRHCTANGTWTGTAPDCLVISCGDPGTLANGIQFGTDFTFNKTVSYQCNPGYVMEAVTSATIRCTKDGRWNPSKPVCKGLLCPQPPPVQNGTVEGSDFRWGSSISYSCMDGYQLSHSAILSCEGRGVWKGEIPQCLPVFCGDPGIPAEGRLSGKSFTYKSEVFFQCKSPFILVGSSRRVCQADGTWSGIQPTCIDPAHNTCPDPGTPHFGIQNSSRGYEVGSTVFFRCRKGYHIQGSTTRTCLANLTWSGIQTECIPHACRQPETPAHADVRAIDLPTFGYTLVYTCHPGFFLAGGSEHRTCKADMKWTGKSPVCKSKSLIKEWHTFPKSKGKDQLPIRLVSTCETHK

SEQ ID NO: 1117 - DNA, 3145 bp, Homo sapiens
  CDS (34)..(3045)
attttacttgctggatcttcagccttgacctgtatggcaaatggcttatgggaccgatccctgcccaagtgtttggctatatcctgtggacacccaggggtccctgccaacgccgtcctcactggagagctgtttacctatggcgccgtcgtgcactactcctgcagagggagcgagagcctcataggcaacgacacgagagtgtgccaggaagacagtcactggagcggggcactgccccactgcacaggaaataatcctggattctgtggtgatccggggaccccagcacatgggtctcggcttggtgatgactttaagacaaagagtcttctccgcttctcctgtgaaatggggcaccagctgaggggctcccctgaacgcacgtgttcgctcaatgggtcatggtcaggactgcagccggtgtgtgaggccgtgtcctgtggcaaccctggcacacccaccaacggaatgattgtcagtagtgatggcattctgttctccagctcggtcatctatgcctgctgggaaggctacaagacctcagggctcatgacacggcattgcacagccaatgggacctggacaggcactgctcccgactgcacaattataagttgtggggatccaggcacactagcaaatggcatccagtttgggaccgacttcaccttcaacaagactgtgagctatcagtgtaacccaggctatgtcatggaagcagtcacatccgccactattcgctgtaccaaagacggcaggtggaatccgagcaaacctgtctgcaaagccgtgctgtgtcctcagccgccgccggtgcagaatggaacagtggagggaagtgatttccgctggggctccagcataagttacagctgcatggacggttaccagctctctcactccgccatcctctcctgtgaaggtcgcggggtgtggaaaggagagatccccagtgtctgcctgtgttctgcggagaccctggcatccccgcagaagggcgacttagtgggaaaagtttcacctataagtccgaagtcttcttccagtgcaaatctccatttatactcgtgggatcctccagaagagtctgccaagctgacggcacgtggagcggcatacaacccacctgcattggtaataattatcatacagctctggggatacctgggagtatttggagatgaggacgcttcattccgaaattgggtcatttgtgattacatagaaagtgtttccatagacagttttctgtacaaggttggaagcacggtttttttcaggtgcagaaaaggctaccatattcaaggttccacgactcgcacctgccttgccaatttaacatggagtgggatacagaccgaatgtatacctcatgcctgcagacagccagaaaccccggcacacgcggatgtgagagccatcgatcttcctactttcggctacaccttagtgtacacctgccatccaggctttttcctcgcagggggatctgagcacagaacatgtaaagcagacatgaaatggacaggaaagtcgcctgtgtgtaaaattccttcagatgtctttttcgtcaattcactgtggaaggggtattatgaatatttagggaaaagacaacccgccactctaactgttgactggttcaatgcaacaagcagtaaggtgaatgccaccttcagcgaagcctcgccagtggagctgaagttgacaggcatttacaagaaggaggaggcccacttactcctgaaagcttttcaaattaaaggccaggcagatatttttgtaagcaagttcgaaaatgacaactggggactagatggttatgtgtcatctggacttgaaagaggaggatttacttttcaaggtgacattcatggaaaagactttggaaaatttaagctagaaaggcaaggatgggtcacaatattcttgagcctatttcttcatcttaaatctcagtatagaagttcccaaggttgttacgagattgagaggccacatcctttaaacccagatcaagactcttccagtcattaccacggcaccagcagtggctctgtggcggctgccattctggttcctttctttgctctaattttatcagggtttgcattttacctctacaaacacagaacgagaccaaaagttcaatacaatggctatgctgggcatgaaaacagcaatggacaagcatcgtttgaaaaccccatgtatgatacaaacttaaaacccacagaagccaaggctaaaaccacacacgggctgctcacgtctctggactccaagagaaagatggttataaccctggcagagtctttacccgccctgcgaacctgcctgttgatctgcttcccactcctctttagacttgctcgtgaatcttcagcacagccatttgttttgagtattcaaacacataaaaagatatctggcaacttcccacttcttatgacttctcagacaccttgtaacggagcttcccttggaggtggacaaacttctcactcacaagagagacggagagcaacagagagagatgggcagggattgattcgaggattggctgactcgattatggagggtgagaagtcccaggacaggccgtctgcaaggcgtaaacccagggaagctgctggtatggctcggttcaagtccaaaggcctcagcaccaaggaaaccaaggtgataactctcagttcgggtcaaagtcctgggagtctgcaaggcctctcattgagtaagtctcacaagatccgatggttttataaagggcagttcccctgcacaagctctcttctctgccaccacgcgtttgctgttcattcacctttcaccatgattgtgaggcctcccagccatgtggaactgtgcaaagaggatgttcaaagggcatcttggaccaggaggaggaagcccattgtgaggatggcaaagaacaataaatggaaggcccgtggaaccctgagcggctgccccatcactgtcctctccatcctttccatgcttcccatggtgcatggctctcaggctctccaagcaccatgagctcctggcgcgtatggcctggcccctgagtgtggagtctgtggactttaaatgtgcctttactcagccagcatctccctggctgggtgcgatgttg

SEQ ID NO: 1118 - protein, 1004 aa, Homo sapiens
MANGLWDRSLPKCLAISCGHPGVPANAVLTGELFTYGAVVHYSCRGSESLIGNDTRVCQEDSHWSGALPHCTGNNPGFCGDPGTPAHGSRLGDDFKTKSLLRFSCEMGHQLRGSPERTCSLNGSWSGLQPVCEAVSCGNPGTPTNGMIVSSDGILFSSSVIYACWEGYKTSGLMTRHCTANGTWTGTAPDCTIISCGDPGTLANGIQFGTDFTFNKTVSYQCNPGYVMEAVTSATIRCTKDGRWNPSKPVCKAVLCPQPPPVQNGTVEGSDFRWGSSISYSCMDGYQLSHSAILSCEGRGVWKGEIPSVCLCSAETLASPQKGDLVGKVSPISPKSSSSANLHLYSWDPPEESAKLTARGAAYNPPALVIIIIQLWGYLGVFGDEDASFRNWVICDYIESVSIDSFLYKVGSTVFFRCRKGYHIQGSTTRTCLANLTWSGIQTECIPHACRQPETPAHADVRAIDLPTFGYTLVYTCHPGFFLAGGSEHRTCKADMKWTGKSPVCKIPSDVFFVNSLWKGYYEYLGKRQPATLTVDWFNATSSKVNATFSEASPVELKLTGIYKKEEAHLLLKAFQIKGQADIFVSKFENDNWGLDGYVSSGLERGGFTFQGDIHGKDFGKFKLERQGWVTIFLSLFLHLKSQYRSSQGCYEIERPHPLNPDQDSSSHYHGTSSGSVAAAILVPFFALILSGFAFYLYKHRTRPKVQYNGYAGHENSNGQASFENPMYDTNLKPTEAKAKTTHGLLTSLDSKRKMVITLAESLPALRTCLLICFPLLFRLARESSAQPFVLSIQTHKKISGNFPLLMTSQTPCNGASLGGGQTSHSQERRRATERDGQGLIRGLADSIMEGEKSQDRPSARRKPREAAGMARFKSKGLSTKETKVITLSSGQSPGSLQGLSLSKSHKIRWFYKGQFPCTSSLLCHHAFAVHSPFTMIVRPPSHVELCKEDVQRASWTRRRKPIVRMAKNNKWKARGTLSGCPITVLSILSMLPMVHGSQALQAP

SEQ ID NO: 1119 - DNA, 3145 bp, Homo sapiens
  CDS (34)..(3045)
attttacttgctggatcttcagccttgacctgtatggcaaatggcttatgggaccgatccctgcccaagtgtttggctatatcctgtggacacccaggggtccctgccaacgccgtcctcactggagagctgtttacctatggcgccgtcgtgcactactcctgcagagggagcgagagcctcataggcaacgacacgagagtgtgccaggaagacagtcactggagcggggcactgccccactgcacaggaaataatcctggattctgtggtgatccggggaccccagcacatgggtctcggcttggtgatgactttaagacaaagagtcttctccgcttctcctgtgaaatggggcaccagctgaggggctcccctgaacgcacgtgtttgctcaatgggtcatggtcaggactgcagccggtgtgtgaggccgtgtcctgtggcaaccctggcacacccaccaacggaatgattgtcagtagtgatggcattctgttctccagctcggtcatctatgcctgctgggaaggctacaagacctcagggctcatgacacggcattgcacagccaatgggacctggacaggcactgctcccgactgcacaattataagttgtggggatccaggcacactagcaaatggcatccagtttgggaccgacttcaccttcaacaagactgtgagctatcagtgtaacccaggctatgtcatggaagcagtcacatccgccactattcgctgtaccaaagacggcaggtggaatccgagcaaacctgtctgcaaagccgtgctgtgtcctcagccgccgccggtgcagaatggaacagtggagggaagtgatttccgctggggctccagcataagttacagctgcatggacggttaccagctctctcactccgccatcctctcctgtgaaggtcgcggggtgtggaaaggagagatccccagtgtctgcctgtgttctgcggagaccctggcatccccgcagaagggcgacttagtgggaaaagtttcacctataagtccgaagtcttcttccagtgcaaatctccatttatactcgtgggatcctccagaagagtctgccaagctgacggcacgtggagcggcatacaacccacctgcattggtaataattatcatacagctctggggatacctgggagtatttggagatgaggacgcttcattccgaaattgggtcatttgtgattacatagaaagtgtttccatagacagttttctgtacaaggttggaagcacggtttttttcaggtgcagaaaaggctaccatattcaaggttccacgactcgcacctgccttgccaatttaacatggagtgggatacagaccgaatgtatacctcatgcctgcagacagccagaaaccccggcacacgcggatgtgagagccatcgatcttcctactttcggctacaccttagtgtacacctgccatccaggctttttcctcgcagggggatctgagcacagaacatgtaaagcagacatgaaatggacaggaaagtcgcctgtgtgtaaaattccttcagatgtctttttcgtcaattcactgtggaaggggtattatgaatatttagggaaaagacatcccgccactctaactgttgactggttcaatgcaacaagcagtaaggtgaatgccaccttcagcgaagcctcgccagtggagctgaagttgacaggcatttacaagaaggaggaggcccacttactcctgaaagcttttcaaattaaaggccaggcagatatttttgtaagcaagttcgaaaatgacaactggggactagatggttatgtgtcatctggacttgaaagaggaggatttacttttcaaggtgacattcatggaaaagactttggaaaatttaagctagaaaggcaaggatgggtcacaatattcttgagcctatttcttcatcttaaatctcagtatagaagttcccaaggttgttacgagattgagaggccacatcctttaaacccagatcaagactcttccagtcattaccacggcaccagcagtggctctgtggcggctgccattctggttcctttctttgctctaattttatcagggtttgcattttacctctacaaacacagaacgagaccaaaagttcaatacaatggctatgctgggcatgaaaacagcaatggacaagcatcgtttgaaaaccccatgtatgatacaaacttaaaacccacagaagccaaggctaaaaccacacacgggctgctcacgtctctggactccaagagaaagatggttataaccctggcagagtctttacccgccctgcgaacctgcctgttgatctgcttcccactcctctttagacttgctcgtgaatcttcagcacagccatttgttttgagtattcaaacacataaaaagatatctggcaacttcccacttcttatgacttctcagacaccttgtaacggagcttcccttggaggtggacaaacttctcactcacaagagagacggagagcaacagagagagatgggcagggattgattcgaggattggctgactcgattatggagggtgagaagtcccaggacaggccgtctgcaaggcgtaaacccagggaagctgctggtatggctcggttcaagtccaaaggcctcagcaccaaggaaaccaaggtgataactctcagttcgggtcaaagtcctgggagtctgcaaggcctctcattgagtaagtctcacaagatccgatggttttataaagggcagttcccctgcacaagctctcttctctgccaccacgcgtttgctgttcattcacctttcaccatgattgtgaggcctcccagccatgtggaactgtgcaaagaggatgttcaaagggcatcttggaccaggaggaggaagcccattgtgaggatggcaaagaacaataaatggaaggcccgtggaaccctgagcggctgccccatcactgtcctctccatcctttccatgcttcccatggtgcatggctctcaggctctccaagcaccatgagctcctggcgcgtatggcctggcccctgagtgtggagtctgtggactttaaatgtgcctttactcagccagcatctccctggctgggtgcgatgttg

SEQ ID NO: 1120 - protein, 1004 aa, Homo sapiens
MANGLWDRSLPKCLAISCGHPGVPANAVLTGELFTYGAVVHYSCRGSESLIGNDTRVCQEDSHWSGALPHCTGNNPGFCGDPGTPAHGSRLGDDFKTKSLLRFSCEMGHQLRGSPERTCLLNGSWSGLQPVCEAVSCGNPGTPTNGMIVSSDGILFSSSVIYACWEGYKTSGLMTRHCTANGTWTGTAPDCTIISCGDPGTLANGIQFGTDFTFNKTVSYQCNPGYVMEAVTSATIRCTKDGRWNPSKPVCKAVLCPQPPPVQNGTVEGSDFRWGSSISYSCMDGYQLSHSAILSCEGRGVWKGEIPSVCLCSAETLASPQKGDLVGKVSPISPKSSSSANLHLYSWDPPEESAKLTARGAAYNPPALVIIIIQLWGYLGVFGDEDASFRNWVICDYIESVSIDSFLYKVGSTVFFRCRKGYHIQGSTTRTCLANLTWSGIQTECIPHACRQPETPAHADVRAIDLPTFGYTLVYTCHPGFFLAGGSEHRTCKADMKWTGKSPVCKIPSDVFFVNSLWKGYYEYLGKRHPATLTVDWFNATSSKVNATFSEASPVELKLTGIYKKEEAHLLLKAFQIKGQADIFVSKFENDNWGLDGYVSSGLERGGFTFQGDIHGKDFGKFKLERQGWVTIFLSLFLHLKSQYRSSQGCYEIERPHPLNPDQDSSSHYHGTSSGSVAAAILVPFFALILSGFAFYLYKHRTRPKVQYNGYAGHENSNGQASFENPMYDTNLKPTEAKAKTTHGLLTSLDSKRKMVITLAESLPALRTCLLICFPLLFRLARESSAQPFVLSIQTHKKISGNFPLLMTSQTPCNGASLGGGQTSHSQERRRATERDGQGLIRGLADSIMEGEKSQDRPSARRKPREAAGMARFKSKGLSTKETKVITLSSGQSPGSLQGLSLSKSHKIRWFYKGQFPCTSSLLCHHAFAVHSPFTMIVRPPSHVELCKEDVQRASWTRRRKPIVRMAKNNKWKARGTLSGCPITVLSILSMLPMVHGSQALQAP

SEQ ID NO: 1121 - DNA, 1171 bp, Homo sapiens
  CDS (2)..(1030)
ggaggccgcaaggcccttcgcccgggagtggagggcccagtccctacccctggcagtagggggcgttttgaagctgcggctctgtgagctgtggctactgctactgggttctagtttgaacgccagatttttgccagacgaggaggacgtagactttatcaacgagtacgtgaacctccacaatgagctgcggggcgacgttattccccgagggtctaacttgcgcttcatgacttgggatgtagctttatcacggactgctagagcatggggaaaaaaatgtttgtttacgcataatatttatttacaagatgtacaaatggtccatcctaaattttatggtattggtgaaaatatgtgggtcggccctgaaaatgaatttactgcaagtattgctatcagaagttggcatgcagagaagaaaatgtacaattttgaaaatggcagttgctctggagactgttctaattatattcagcttgtttgggaccactcttacaaagttggttgtgctgttactccatgttcaaaaattggacatattatacatgcagcaattttcatatgcaactatgcgccaggaggaacactgacgagaagaccttatgaaccaggaatattttgtactcgatgtggcagacgtgacaaatgcacagattttctatgcagtaatgcagatcgtgaccaagccacatattaccgattttggtatccaaaatgggaaatgccccggccagttgtgtgtgatccactgtgcacattcattttattattgagaatattatgttttatcctgtgtgtcataactgttttgatagtacagtctcagtttccaaatatcttgttggaacaacaaatgatatttacccctgaggaatctgaagcagggaatgaagaggaggaaaaagaggaagagaagaaagagaaagaggaaatggaaatggaaataatggaaatggaggaggaaaaagaagagagagaggaggaggaggaggaaacacaaaaagaaaagatggaggaagaggaaaaataagagtagaaagaggaggaaaaagatgtatcaccaatataaaccaaaagtgtaatacaaaaaaagacagaaaaaaaaaaaaagtaaaacactgagttttaacaagaaagaaaatatgcaaaccaccattggaatgttttt

SEQ ID NO: 1122 - protein, 343 aa, Homo sapiens
EAARPFAREWRAQSLPLAVGGVLKLRLCELWLLLLGSSLNARFLPDEEDVDFINEYVNLHNELRGDVIPRGSNLRFMTWDVALSRTARAWGKKCLFTHNIYLQDVQMVHPKFYGIGENMWVGPENEFTASIAIRSWHAEKKMYNFENGSCSGDCSNYIQLVWDHSYKVGCAVTPCSKIGHIIHAAIFICNYAPGGTLTRRPYEPGIFCTRCGRRDKCTDFLCSNADRDQATYYRFWYPKWEMPRPVVCDPLCTFILLLRILCFILCVITVLIVQSQFPNILLEQQMIFTPEESEAGNEEEEKEEEKKEKEEMEMEIMEMEEEKEEREEEEEETQKEKMEEEEK

SEQ ID NO: 1123 - DNA, 2800 bp, Homo sapiens
  CDS (26)..(2800)
tagacgcggagcccaaggaggtaaaatgcacacttgctgccccccagtaactttggaacaggaccttcacagaaaaatgcatagctggatgctgcagactctagcgtttgctgtaacatctctcgtcctttcgtgtgcagaaaccatcgattattacggggaaatctgtgacaatgcatgtccttgtgaggaaaaggacggcattttaactgtgagctgtgaaaaccgggggatcatcagtctctctgaaattagccctccccgtttcccaatctaccacctcttgttgtccggaaaccttttgaaccgtctctatcccaatgagtttgtcaattacactggggcttcaattttgcatctaggtagcaatgttatccaggacattgagaccggggctttccatgggctacggggtttgaggagattgcatctaaacaataataaactggaacttctgcgagatgataccttccttggcttggagaacctggagtacctacaggtcgattacaactacatcagcgtcattgaacccaatgcttttgggaaactgcatttgttgcaggtgcttatcctcaatgacaatcttttgtccagtttacccaacaatcttttccgttttgtgcccttaacgcacttggacctccgggggaaccggctgaaacttctgccctacgtggggctcttgcagcacatggataaagttgtggagctacagctggaggaaaacccttggaattgttcttgtgagctgatctctctaaaggattggttggacagcatctcctattcagccctggtgggggatgtagtttgtgagacccccttccgcttacacggaagggacttggacgaggtatccaagcaggaactttgcccaaggagacttatttctgactacgagatgaggccgcagacgcctttgagcaccacggggtatttacacaccaccccggcgtcagtgaattctgtggccacttcttcctctgctgtttacaaaccccctttgaagccccctaaggggactcgccaacccaacaagcccagggtgcgccccacctctcggcagccctctaaggacttgggctacagcaactatggccccagcatcgcctatcagaccaaatccccggtgcctttggagtgtcccaccgcgtgctcttgcaacctgcagatctctgatctgggcctcaacgtaaactgccaggagcgaaagatcgagagcatcgctgaactgcagcccaagccctacaatcccaagaaaatgtatctgacagagaactacatcgctgtcgtgcgcaggacagacttcctggaggccacggggctggacctcctgcacctggggaataaccgcatctcgatgatccaggaccgcgctttcggggatctcaccaacctgaggcgcctctacctgaatggcaacaggatcgagaggctgagcccggagttattctatggcctgcagagcctgcagtatctcttcctccagtacaatctcatccgcgagattcagtctggaacttttgacccggtcccaaacctccagctgctattcttgaataacaacctcctgcaggccatgccctcaggcgtcttctctggcttgaccctcctcaggctaaacctgaggagtaaccacttcacctccttgccagtgagtggagttttggaccagctgaagtcactcatccaaatcgacctgcatgacaatccttgggattgtacctgtgacattgtgggcatgaagctgtgggtggagcagctcaaagtgggcgtcctagtggacgaggtgatctgtaaggcgcccaaaaaattcgctgagaccgacatgcgctccattaagtcggagctgctgtgccctgactattcagatgtagtagtttccacgcccacaccctcctctatccaggtccctgcgaggaccagcgccgtgactcctgcggtccggttgaatagcaccggggcccccgcgagcttgggcgcaggcggaggggcgtcgtcggtgcccttgtctgtgttaattctcagcctcctgctggttttcatcatgtccgtcttcgtggccgccgggctcttcgtgctggtcatgaagcgcaggaagaagaaccagagcgaccacaccagcaccaacaactccgacgtgagctcctttaacatgcagtacagcgtgtacggcggcggcggcggcacgggcggccacccacacgcgcacgtgcatcaccgcgggcccgcgctgcccaaggtgaagacgcccgcgggccacgtgtatgaatacatcccccacccactgggccacatgtgcaaaaaccccatctaccgctcccgagagggcaactccgtagaggattacaaagacctgcacgagctcaaggtcacctacagcagcaaccaccacctgcagcagcagcagcagccgccgccgccaccgcagcagccacagcagcagcccccgccgcagctgcagctgcagcctggggaggaggagaggcgggaaagccaccacttgcggagccccgcctacagcgtcagcaccatcgagccccgggaggacctgctgtcgccggtgcaggacgccgaccgcttttacaggggcattttagaaccagacaaacactgctccaccacccccgccggcaatagcctcccggaatatcccaaattcccgtgcagccccgctgcttacactttctcccccaactatgacctgagacgcccccatcagtatttgcacccgggggcaggggacagcaggctacgggaaccggtgctctacagccccccgagtgctgtctttgta

SEQ ID NO: 1124 - protein, 925 aa, Homo sapiens
MHTCCPPVTLEQDLHRKMHSWMLQTLAFAVTSLVLSCAETIDYYGEICDNACPCEEKDGILTVSCENRGIISLSEISPPRFPIYHLLLSGNLLNRLYPNEFVNYTGASILHLGSNVIQDIETGAFHGLRGLRRLHLNNNKLELLRDDTFLGLENLEYLQVDYNYISVIEPNAFGKLHLLQVLILNDNLLSSLPNNLFRFVPLTHLDLRGNRLKLLPYVGLLQHMDKVVELQLEENPWNCSCELISLKDWLDSISYSALVGDVVCETPFRLHGRDLDEVSKQELCPRRLISDYEMRPQTPLSTTGYLHTTPASVNSVATSSSAVYKPPLKPPKGTRQPNKPRVRPTSRQPSKDLGYSNYGPSIAYQTKSPVPLECPTACSCNLQISDLGLNVNCQERKIESIAELQPKPYNPKKMYLTENYIAVVRRTDFLEATGLDLLHLGNNRISMIQDRAFGDLTNLRRLYLNGNRIERLSPELFYGLQSLQYLFLQYNLIREIQSGTFDPVPNLQLLFLNNNLLQAMPSGVFSGLTLLRLNLRSNHFTSLPVSGVLDQLKSLIQIDLHDNPWDCTCDIVGMKLWVEQLKVGVLVDEVICKAPKKFAETDMRSIKSELLCPDYSDVVVSTPTPSSIQVPARTSAVTPAVRLNSTGAPASLGAGGGASSVPLSVLILSLLLVFIMSVFVAAGLFVLVMKRRKKNQSDHTSTNNSDVSSFNMQYSVYGGGGGTGGHPHAHVHHRGPALPKVKTPAGHVYEYIPHPLGHMCKNPIYRSREGNSVEDYKDLHELKVTYSSNHHLQQQQQPPPPPQQPQQQPPPQLQLQPGEEERRESHHLRSPAYSVSTIEPREDLLSPVQDADRFYRGILEPDKHCSTTPAGNSLPEYPKFPCSPAAYTFSPNYDLRRPHQYLHPGAGDSRLREPVLYSPPSAVFV

SEQ ID NO: 1125 - DNA, 1872 bp, Homo sapiens
  CDS (1)..(1872)
ggatccatcgattattacggggaaatctgtgacaatgcatgtccttgtgaggaaaaggacggcattttaactgtgagctgtgaaaaccgggggatcatcagtctctctgaaattagccctccccgtttcccaatctaccacctcttgttgtccggaaaccttttgaaccgtctctatcccaatgagtttgtcaattacactggggcttcaattttgcatctaggtagcaatgttatccaggacattgagaccggggctttccatgggctacggggtttgaggagattgcatctaaacaataataaactggaacttctgcgagatgataccttccttggcttggagaacccggagtacctacaggtcgattacaactacatcagcgtcattgaacccaatgcttttgggaaactgcatttgttgcaggtgcttatcctcaatgacaatcttttgtccagtttacccaacaatcttttccgttttgtgcccttaacgcacttggacctccgggggaaccggctgaaacttctgccctacgtggggctcttgcagcacatggataaagttgtggagctacagctggaggaaaacccttggaattgttcttgtgagctgatctctctaaaggattggttggacagcatctcctattcagccctggtgggggatgtagtttgtgagacccccttccgcttacacggaagggacttggacgaggtatccaagcaggaactttgcccaaggagacttatttctgactacgagatgaggccgcagacgcctttgagcaccacggggtatttacacaccaccccggcgtcagtgaattctgtggccacttcttcctctgctgtttacaaaccccctttgaagccccctaaggggactcgccaacccaacaagcccagggtgcgccccacctctcggcagccctctaaggacttgggctacagcaactatggccccagcatcgcctatcagaccaaatccccggtgcctttggagtgtcccaccgcgtgctcttgcaacctgcagatctctgatctgggcctcaacgtaaactgccaggagcgaaagatcgagagcatcgctgaactgcagcccaagccctacaatcccaagaaaatgtatctgacagagaactacatcgctgtcgtgcgcaggacagacttcctggaggccacggggctggacctcctgcacctggggaataaccgcatctcgatgatccaggaccgcgctttcggggatctcaccaacctgaggcgcctctacctgaatggcaacaggatcgagaggctgagcccggagttattctatggcctgcagagcctgcagtatctcttcctccagtacaatctcatccgcgagattcagtctggaacttttgacccggtcccaaacctccagctgctattcttgaataacaacctcctgcaggccatgccctcaggcgtcttctctggcttgaccctcctcaggctaaacctgaggagtaaccacttcacctccttgccagtgagtggagttttggaccagctgaagtcactcatccaaatcgacctgcatgacaatccttgggattgtacctgtgacattgtgggcatgaagctgtgggtggagcagctcaaagtgggcgtcctagtggacgaggtgatctgtaaggcgcccaaaaaattcgctgagaccgacatgcgctccattaagtcggagctgctgtgccctgactattcagatgtagtagtttccacgcccacaccctcctctatccaggtccctgcgaggaccagcgccgtgactcctgcggtccggttgaatagcaccggggcccccgcgagcttgggcgcaggcggaggggcgtcgtcgctcgag

SEQ ID NO: 1126 - protein, 624 aa, Homo sapiens
GSIDYYGEICDNACPCEEKDGILTVSCENRGIISLSEISPPRFPIYHLLLSGNLLNRLYPNEFVNYTGASILHLGSNVIQDIETGAFHGLRGLRRLHLNNNKLELLRDDTFLGLENPEYLQVDYNYISVIEPNAFGKLHLLQVLILNDNLLSSLPNNLFRFVPLTHLDLRGNRLKLLPYVGLLQHMDKVVELQLEENPWNCSCELISLKDWLDSISYSALVGDVVCETPFRLHGRDLDEVSKQELCPRRLISDYEMRPQTPLSTTGYLHTTPASVNSVATSSSAVYKPPLKPPKGTRQPNKPRVRPTSRQPSKDLGYSNYGPSIAYQTKSPVPLECPTACSCNLQISDLGLNVNCQERKIESIAELQPKPYNPKKMYLTENYIAVVRRTDFLEATGLDLLHLGNNRISMIQDRAFGDLTNLRRLYLNGNRIERLSPELFYGLQSLQYLFLQYNLIREIQSGTFDPVPNLQLLFLNNNLLQAMPSGVFSGLTLLRLNLRSNHFTSLPVSGVLDQLKSLIQIDLHDNPWDCTCDIVGMKLWVEQLKVGVLVDEVICKAPKKFAETDMRSIKSELLCPDYSDVVVSTPTPSSIQVPARTSAVTPAVRLNSTGAPASLGAGGGASSLE

SEQ ID NO: 1127 - DNA, 4500 bp, Homo sapiens
  CDS (178)..(3093)
cggaacccgcggtcgccaccgcggcggcggccccaggctggaggcgtccgggcgcctctttcctccagcctctgggactgcgctgctcgcagtctcctcgccctgcctgggcttgagaaacctagtgcataccccaaagagggtttttgtgtatgtgtgtgtttttaaagggtggctatgatgactgggccttggagacgcggagaccaaggaggtaaaatgcacacttgctgccccccagtaactttggaacaggaccttcacagaaaaatgcatagctggatgctgcagactctagcgtttgctgtaacatctctcgtcctttcgtgtgcagaaaccatcgattattacggggaaatctgtgacaatgcatgtccttgtgaggaaaaggacggcattttaactgtgagctgtgaaaaccgggggatcatcagtctctctgaaattagccctccccgtttcccaatctaccacctcttgttgtccggaaaccttttgaaccgtctctatcccaatgagtttgtcaattacactggggcttcaattttgcatctaggtagcaatgttatccaggacattgagaccggggctttccatgggctacggggtttgaggagattgcatctaaacaataataaactggaacttctgcgagatgataccttccttggcttggagaacctggagtacctacaggtcgattacaactacatcagcgtcattgaacccaatgcttttgggaaactgcatttgttgcaggtgcttatcctcaatgacaatcttttgtccagtttacccaacaatcttttccgttttgtgcccttaacgcacttggacctccgggggaaccggctgaaacttctgccctacgtggggctcttgcagcacatggataaagttgtggagctacagctggaggaaaacccttggaattgttcttgtgagctgatctctctaaaggattggttggacagcatctcctattcagccctggtgggggatgtagtttgtgagacccccttccgcttacacggaagggacttggacgaggtatccaagcaggaactttgcccaaggagacttatttctgactacgagatgaggccgcagacgcctttgagcaccacggggtatttacacaccaccccggcgtcagtgaattctgtggccacttcttcctctgctgtttacaaaccccctttgaagccccctaaggggactcgccaacccaacaagcccagggtgcgccccacctctcggcagccctctaaggacttgggctacagcaactatggccccagcatcgcctatcagaccaaatccccggtgcctttggagtgtcccaccgcgtgctcttgcaacctgcagatctctgatctgggcctcaacgtaaactgccaggagcgaaagatcgagagcatcgctgaactgcagcccaagccctacaatcccaagaaaatgtatctgacagagaactacatcgctgtcgtgcgcaggacagacttcctggaggccacggggctggacctcctgcacctggggaataaccgcatctcgatgatccaggaccgcgctttcggggatctcaccaacctgaggcgcctctacctgaatggcaacaggatcgagaggctgagcccggagttattctatggcctgcagagcctgcagtatctcttcctccagtacaatctcatccgcgagattcagtctggaacttttgacccggtcccaaacctccagctgctattcttgaataacaacctcctgcaggccatgccctcaggcgtcttctctggcttgaccctcctcaggctaaacctgaggagtaaccacttcacctccttgccagtgagtggagttttggaccagctgaagtcactcatccaaatcgacctgcatgacaatccttgggattgtacctgtgacattgtgggcatgaagctgtgggtggagcagctcaaagtgggcgtcctagtggacgaggtgatctgtaaggcgcccaaaaaattcgctgagaccgacatgcgctccattaagtcggagctgctgtgccctgactattcagatgtagtagtttccacgcccacaccctcctctatccaggtccctgcgaggaccagcgccgtgactcctgcggtccggttgaatagcaccggggcccccgcgagcttgggcgcaggcggaggggcgtcgtcggtgcccttgtctgtgttaattctcagcctcctgctggttttcatcatgtccgtcttcgtggccgccgggctcttcgtgctggtcatgaagcgcaggaagaagaaccagagcgaccacaccagcaccaacaactccgacgtgagctcctttaacatgcagtacagcgtgtacggcggcggcggcggcacgggcggccacccacacgcgcacgtgcatcaccgcgggcccgcgctgcccaaggtgaagacgcccgcgggccacgtgtatgaatacatcccccacccactgggccacatgtgcaaaaaccccatctaccgctcccgagagggcaactccgtagaggattacaaagacctgcacgagctcaaggtcacctacagcagcaaccaccacctgcagcagcagcagcagccgccgccgccaccgcagcagccacagcagcagcccccgccgcagctgcagctgcagcccggggaggaggagaggcgggaaagccaccacttgcggagccccgcctacagcgtcagcaccatcgagccccgggaggacctgctgtcgccggtgcaggacgccgaccgcttttacaggggcattttagaaccagacaaacactgctccaccacccccgccggcaatagcctcccggaatatcccaaattcccgtgcagccccgctgcttacactttctcccccaactatgacctgagacgcccccatcagtatttgcacccgggggcaggggacagcaggctacgggaaccggtgctctacagccccccgagtgctgtctttgtagaacccaaccggaacgaatatctggagttaaaagcaaaactaaacgttgagccggactacctcgaagtgctggaaaaacagaccacgtttagccagttctaaaagcaaagaaactctcttggagcttttgcatttaaaacaaacaagcaagcagacacacacagtgaacacatttgattaattgtgttgtttcaacgtttagggtgaagtgccttggcacgggatttctcagcttcggtggaagatacgaaaagggtgtgcaatttcctttaaaatttacacgtgggaaacatttgtgtaaactgggcacatcactttctcttcttgcgtgtggggcaggtgtggagaagggctttaaggaggccaatttgctgcgcgggtgacctgtgaaaggtcacagtcatttttgtagtggttggaagtgctaagaatggtggatgatggcagagcatagattctactcttcctctttagcttcctccccatccaacgaaccctgcccaacactctaaatatccaccagataagacatggaatgaggtctaaatgacacaaagtgaagaaatcaacacaacacaaactttacagctaacaacaaatgatcaacaaaaaccgaaccaacaagacaaccatcgaacctcaccactccacactcacaacaactcatatcaagacaacaacacaatgacgttaaaggaaacgaaatcaatgcaaaaatagacatttgacaatacaaaaaaacaagaaccgtgatcacactacaaccgaagcaaccatagatgtgagaaaaaacaacaaacaaaacaccgagctatatgatccataattgattagtcaaaataacttattgatgaaatatacaaatattttattgtagcacctatttttatatgcacatttagcattcctctttccttcactatttagcctatgattttgcagaggtgtcacactgtattaggatctgcatttctaaaactgacgtggtatcaggaaggcattttcaatcattcaaaatgtggagaatttaatggctaaatctttaaaagccaatgcaacccacccaattgaatctgcattttcttttaagaaaacagagctgattgtatcccaatgtattttaaaaaatagggcaattgattgggccattccgagagaattgtttgcaagttttgggttttattagaaaatatttgaaagtatttttattaatgaaccaaaatgacatgttcatttgactactattgtagccgattttcgattgtttaaccaaacccagttgcatttgtacagatccacgtgtactggcacctcagaagaccaaatcatggactgtacaagtctctatacaatgtctttatccctgtgggcagcaagcaatgatgataatgacaaacaggatatctgtaagatggggctactgttgttacagtctcatatgtatcccagcacatgtaattttttaaatagtttctgaataaacacttgataactatgtcaaaaaaa

SEQ ID NO: 1128 - protein, 972 aa, Homo sapiens
MMTGPWRRGDQGGKMHTCCPPVTLEQDLHRKMHSWMLQTLAFAVTSLVLSCAETIDYYGEICDNACPCEEKDGILTVSCENRGIISLSEISPPRFPIYHLLLSGNLLNRLYPNEFVNYTGASILHLGSNVIQDIETGAFHGLRGLRRLHLNNNKLELLRDDTFLGLENLEYLQVDYNYISVIEPNAFGKLHLLQVLILNDNLLSSLPNNLFRFVPLTHLDLRGNRLKLLPYVGLLQHMDKVVELQLEENPWNCSCELISLKDWLDSISYSALVGDVVCETPFRLHGRDLDEVSKQELCPRRLISDYEMRPQTPLSTTGYLHTTPASVNSVATSSSAVYKPPLKPPKGTRQPNKPRVRPTSRQPSKDLGYSNYGPSIAYQTKSPVPLECPTACSCNLQISDLGLNVNCQERKIESIAELQPKPYNPKKMYLTENYIAVVRRTDFLEATGLDLLHLGNNRISMIQDRAFGDLTNLRRLYLNGNRIERLSPELFYGLQSLQYLFLQYNLIREIQSGTFDPVPNLQLLFLNNNLLQAMPSGVFSGLTLLRLNLRSNHFTSLPVSGVLDQLKSLIQIDLHDNPWDCTCDIVGMKLWVEQLKVGVLVDEVICKAPKKFAETDMRSIKSELLCPDYSDVVVSTPTPSSIQVPARTSAVTPAVRLNSTGAPASLGAGGGASSVPLSVLILSLLLVFIMSVFVAAGLFVLVMKRRKKNQSDHTSTNNSDVSSFNMQYSVYGGGGGTGGHPHAHVHHRGPALPKVKTPAGHVYEYIPHPLGHMCKNPIYRSREGNSVEDYKDLHELKVTYSSNHHLQQQQQPPPPPQQPQQQPPPQLQLQPGEEERRESHHLRSPAYSVSTIEPREDLLSPVQDADRFYRGILEPDKHCSTTPAGNSLPEYPKFPCSPAAYTFSPNYDLRRPHQYLHPGAGDSRLREPVLYSPPSAVFVEPNRNEYLELKAKLNVEPDYLEVLEKQTTFSQF

SEQ ID NO: 1129 - DNA, 1872 bp, Homo sapiens
  CDS (7)..(1866)
ggatccatcgattattacggggaaatctgtgacaatgcatgtccttgtgaggaaaaggacggcattttaactgtgagctgtgaaaaccgggggatcatcagtctctctgaaattagccctccccgtttcccaatctaccacctcttgttgtccggaaaccttttgaaccgtctctatcccaatgagtttgtcaattacactggggcttcaattttgcatctaggtagcaatgttatccaggacattgagaccggggctttccatgggctacggggtttgaggagattgcatctaaacaataataaactggaacttctgcgagatgataccttccttggcttggagaacctggagtacctacaggtcgattacaactacatcagcgtcattgaacccaatgcttttgggaaactgcatttgttgcaggtgcttatcctcaatgacaatcttttgtccagtttacccaacaatcttttccgttttgtgcccttaacgcacttggacctccgggggaaccggctgaaacttctgccctacgtggggctcttgcagcacatggataaagttgtggagctacagctggaggaaaacccttggaattgttcttgtgagctgatctctctaaaggattggttggacagcatctcctattcagccctggtgggggatgtagtttgtgagacccccttccgcttacacggaagggacttggacgaggtatccaagcaggaactttgcccaaggagacttatttctgactacgagatgaggccgcagacgcctttgagcaccacggggtatttacacaccaccccggcgtcagtgaattctgtggccacttcttcctctgctgtttacaaaccccctttgaagccccctaaggggactcgccaacccaacaagcccagggtgcgccccacctctcggcagccctctaaggacttgggctacagcaactatggccccagcatcgcctatcagaccaaatccccggtgcctttggagtgtcccaccgcgtgctcttgcaacctgcagatctctgatctgggcctcaacgtaaactgccaggagcgaaagatcgagagcatcgctgaactgcagcccaagccctacaatcccaagaaaatgtatctgacagagaactacatcgctgtcgtgcgcaggacagacttcctggaggccacggggctggacctcctgcacctggggaataaccgcatctcgatgatccaggaccgcgctttcggggatctcaccaacctgaggcgcctctacctgaatggcaacaggatcgagaggctgagcccggagttattctatggcctgcagagcctgcagtatctcttcctccagtacaatctcatccgcgagattcagtctggaacttttgacccggtcccaaacctccagctgctattcttgaataacaacctcctgcaggccatgccctcaggcgtcttctctggcttgaccctcctcaggctaaacctgaggagtaaccacttcacctccttgccagtgagtggagttttggaccagctgaagtcactcatccaaatcgacctgcatgacaatccttgggattgtacctgtgacattgtgggcatgaagctgtgggtggagcagctcaaagtgggcgtcctagtggacgaggtgatctgtaaggcgcccaaaaaattcgctgagaccgacatgcgctccattaagtcggagctgctgtgccctgactattcagatgtagtagtttccacgcccacaccctcctctatccaggtccctgcgaggaccagcgccgtgactcctgcggtccggttgaatagcaccggggcccccgcgagcttgggcgcaggcggaggggcgtcgtcgctcgag

SEQ ID NO: 1130 - protein, 620 aa, Homo sapiens
IDYYGEICDNACPCEEKDGILTVSCENRGIISLSEISPPRFPIYHLLLSGNLLNRLYPNEFVNYTGASILHLGSNVIQDIETGAFHGLRGLRRLHLNNNKLELLRDDTFLGLENLEYLQVDYNYISVIEPNAFGKLHLLQVLILNDNLLSSLPNNLFRFVPLTHLDLRGNRLKLLPYVGLLQHMDKVVELQLEENPWNCSCELISLKDWLDSISYSALVGDVVCETPFRLHGRDLDEVSKQELCPRRLISDYEMRPQTPLSTTGYLHTTPASVNSVATSSSAVYKPPLKPPKGTRQPNKPRVRPTSRQPSKDLGYSNYGPSIAYQTKSPVPLECPTACSCNLQISDLGLNVNCQERKIESIAELQPKPYNPKKMYLTENYIAVVRRTDFLEATGLDLLHLGNNRISMIQDRAFGDLTNLRRLYLNGNRIERLSPELFYGLQSLQYLFLQYNLIREIQSGTFDPVPNLQLLFLNNNLLQAMPSGVFSGLTLLRLNLRSNHFTSLPVSGVLDQLKSLIQIDLHDNPWDCTCDIVGMKLWVEQLKVGVLVDEVICKAPKKFAETDMRSIKSELLCPDYSDVVVSTPTPSSIQVPARTSAVTPAVRLNSTGAPASLGAGGGASS

SEQ ID NO: 1131 - DNA, 15603 bp, Homo sapiens
  CDS (518)..(15400)
ctaatagaattcagcggccgctttccccggtgcgcagttgtgcttggacgtttgttcctccctcttcacgctcttcgctgcgggtaagttctaaagtttctgaaggccgttctttgcaatgattcctcatataccttagatacaggcaacttctcccaactctcatccacccgggtgaaaacgctcagactatctggattcaaaaacaaagtaaaagggggcatatataagaggcttgagaaacttttctgggaactcagctcacaggagtgtcccgcggaatgccctgccgcttttcgccacagcatctctcttgcactccgcgttcaactggctacctagagtcttttgctgatgctacttgcttttgccggactggaggttctttgaaatagcagaggtctcagaccaagccgtcagctgaatctttgctggcgctccttaatccctgtaaatatcattgcgtttgcttcaccccttccttctctttatcacatcgttttagggagccaggaccatggacttagcaccagacagggctactggccgcccgtggctcccgttgcacactctatcagtatctcagctccttcgagtgttttggctactgtcattgcttccggggcaggcctgggtccacggggccgagccgcgccaggtgttccaagtgctggaagagcaacctccaggcactctggtaggcaccatccagacgcgccccggcttcacctacaggctcagcgaaagccacgccctgtttgccataaacagtagcaccggagccctgtacaccacctccaccatcgaccgcgagagcctgcccagcgacgtgatcaacctggtggtcctttccagcgcgcccacctaccccaccgaagtgcgagtgctggtgcgggacctcaatgacaacgcccccgttttcccggacccctctatcgtggtcactttcaaggaagacagtagcagcggacgccaagtcatcttagacaccgccaccgactcggacatcggctcaaacggtgtggaccaccgctcctaccgcatcatccgcggcaatgaggcggggcgcttccgtctggacatcaacctgaacccgagcggcgagggagcgttcctgcatctggtgtccaagggcggactggaccgtgaggtcactccgcagtaccagctcctggttgaggtggaggacaagggtgagcctaagcggcggggctaccttcaggtaaacgtgactgtgcaagacattaatgacaaccccccggtttttggcagttctcactaccaggcgggggtgcctgaggacgcggttgtgggttccagcgtcctccaggtggcggcggcggacgcggacgagggcaccaacgcggacatccgctatcgcctgcaggacgaggggacccccttccaaatggaccctgagacgggacttatcacggtgcgggagcccctggacttcgaagctcggcgccaatactcgcttacggtgcaggcgatggacagaggcgtgccttccctcactgggcgcgccgaggcgctgattcagctgctggacgtgaatgacaatgacccggtagtgaagttccgctacttcccggccacctcgcgctacgcctcggtagatgagaatgctcaagtgggcaccgtggtggctctgctcaccgtgacggacgcagattctcccgcggccaacgggaacatctccgtgcaaattctcgggggcaatgagcagcgccactttgaagtgcaaagcagcaaagtgccgaacctgagcctaatcaaggtggccagcgccttggaccgcgagcgcatcccttcctacaacctcacagtttccgtctctgataactacggggcgccccctggcgcagcagtccaggcgcgctcttctgtggcaagcctggtgatttttgttaatgacatcaatgaccatcctcctgtcttttcacagcaagtgtacagagtgaacctgagcgaggaggcgcctccgggaagctatgtgagtgggatatctgccactgatggcgactctggtctcaatgctaatctgcgttacagcattgtctctggcaatggactgggatggttccatatcagtgaacatagcggcctcgtgaccactgggtcctctgggggcctggaccgtgaacttgcttcccagattgttctgaatataagtgcccgggaccagggagttcaccccaaggtgtcctatgcccagcttgtagtaactctcctagatgtgaatgatgaaaagccagtatttagccagccagaagggtatgatgtgtctgtggttgagaatgccccaacagggacagaactgttgatgctcagggcaactgacggggacctgggtgacaacggaacagtgcgcttctccttacaagaggcagagactgaccggaggtccttccgtctggatcctgtgtctgggaggttgagtactatttcctccttggacagagaagagcaagccttctactccctgttggttctggccacagatctgggctcccctccccagtcatcaatggctcgcataaatgtgagtcttctggatataaatgataacagccctgtcttctacccggtccaatactttgctcacattaaggagaatgagcctggaggtagctacatcaccactgtgtctgccactgacccagacttgggtaccaatggtactgtcaaatatagcatatctgctggggacaggtctcggtttcaggtcaatgctcagagtggggttatttctacaagaatggccctagacagagaagaaaaaacagcttatcagttgcaaatagtagctactgatggtggcaatttacaatctcccaaccaggcaatagtaaccatcactgtattggacactcaagacaacccacctgtattcagtcaggttgcctacagctttgtggtttttgagaacgtggcgctgggatatcatgtgggtagtgtgtctgcatccaccatggatctcaattccaacatcagttatctcattactactggggatcagaaaggtatgtttgctatcaaccaggtcactgggcagcttaccacagcaaatgtgattgatagagaagagcaatccttttatcagctgaaggtagtggccagtgggggcacagtgactggagacactatggttaacataacagttaaggatttgaatgacaactctccccatttccttcaggcaatagagagtgtaaatgtggtggagaattggcaggcaggtcacagcattttccaggccaaagctgtggaccctgatgaaggtgtcaatggcatggtactctatagtctgaagcaaaaccccaagaacctgtttgctatcaatgaaaagaatggcactattagtctgcttgggcccctggatgttcatgctggctcctaccaaatagagatcttggcatctgacatgggtgtcccacagctctcctctagtgtcatcctaacagtttatgtccatgatgtaaatgacaattcaccagtgtttgaccaactctcttatgaagtcaccctttctgagtcagaacctgtgaattctcgattctttaaagtacaagcttctgataaggattcaggagcaaatgatggtcaattgtatataaaaagtgaactggaccgtgaacttcaagacagatatgttttaatggttgttgcttctgacagagcagtggaaccccttagtgctactgtgaatgttactgtaattttagaagatgtaaatgataacagacctctttttaacagtaccaattacacattttacttcgaagaagagcagagggctgggtcgtttgtgggcaaagtaagtgctgtagataaagactttgggccaaatggagaagtaaggtattcttttgaaatggtgcagccagattttgagttgcatgccatcagtggggaaattacaaatactcatcagtttgacagggagtctcttatgaggcggagagggactgctgtgtttagctttacagtcatagcaacagatcaggggatccctcagcctctcaaggatcaggccactgtacatgtttacatgaaggatataaatgataatgctcccaaatttttaaaagacttttaccaagctacaatatcagaatcagcagccaatctgacacaagtgttaagagtatctgcctcagatgttgatgaaggtaataatggacttattcactattctataataaaaggaaatgaagaaagacagtttgctatagacagtacctctggtcaggtaacactaattggcaaattagactatgaagcaacacctgcctattcccttgtaattcaagcagtggattcagggacaatccccctcaattcaacgtgtactttaaatattgatattttagatgaaaatgacaataccccttctttccttaaatcaacactgtttgttgatgttttggaaaacatgagaattggtgaactcgtgtcctctgttactgcaactgattccgattcaggtgacaatgttgatttatattacagtattactgggactaacaaccacggaacttttagcattagcccaaacactgggagtatttttcttgccaaaaaactggactttgaaacacagtctttgtataaattaaatataacagcaaaagaccaaggaagacctcctcgttcatctacaatgtcagtggttattcacgtgagggactttaatgacaatcctcctagctttcctcctggagatattttcaagtctattgttgagaacattcccattggtacatctgtcatttcagtgactgcacatgaccctgatgcagacattaatggtcaactatcctacacaatcattcaacagatgccaagaggcaaccactttaccatagatgaagtcaaagggactatatatactaatgctgaaatagatcgggaatttgctaatctctttgagttgactgtaaaagccaatgatcaagctgtgccaatagaaactagacggtatgctttgaagaacgtgaccattttggttacagacctcaatgacaatgtcccaatgtttatatcacaaaacgcccttgctgcagacccatcagctgtgattggttccgttctgacaacaattatggctgctgacccagatgaaggtgctaatggagaaatagagtatgagatcatcaatggggacacagacaccttcattgttgatcgttatagtggagacctgagagtggcttcagcgttggtgccttcacagttgatctacaatctcatagtttcagcaacagaccttgggcctgaaaggaggaaatcgaccactgaattgaccatcattcttcagggccttgatggacctgtttttactcaacccaaatatataactattttgaaggaaggagaacccattggcacaaacgtgatatcaatagaagcagctagccccagaggatctgaggccccagtggagtattatattgtttcagttcgttgtgaagaaaaaactgttggacgcctctttactattggacgacatactggtataattcagaccgcagccattctggaccgggagcaaggagcatgtctttacctggtggatgtttatgccatagaaaaatcaactgcttttcccagaacacagagagcagaggtagaaacaacacttcaggatatcaatgacaatccaccagtatttccaacggacatgctggatctcacggtagaggagaacattggagatggctctaagattatgcagctgacagccatggatgctgacgaggtgcaaatgctctcgtcacatacactatcattagtgggttctttggtagcagccattttagccacggatgatgactctggtgtgaatggagaaattacatatattgtgaatgaagatgatgaagatggcatctttttcctgaatcctattactggggtctttaatttgactcgattattagattatgaagtacagcaatattatatcctcactgttcgagcagaagatggtgggggacaatttactaccatcagagtttatttcaatattctagatgtaaatgataatccacctattttcagcttgaattcatacagcacatctttaatggagaatctacctgtgggatctactgttcttgtgtttaatgttactgatgcagatatgatgaaggcagaaataaagatgttctttgaaaccagtgagaacaaagacacaacataccagaatctctgggacacattcaaagcagtgtgtagagggaaatttatagcactaaatgcccacaagagaaagcaggaaagatccaaaattgacaccctaacatcacaattaaaagaactagaaaagcaagagcaaacacattcaaaagctagcagaaggcaagaaataactaaaatcagagcagaactgaaggatatagagacacaaaaaacccttcaaaaaattaatgaatccaggagctggttttttgaaaggatcaacaaaattgatagaccgctagcaagactaataaagaagaaaacagagaagaatcaaatagacgcaataaaaaatgataaaggggatatcaccatcgatcccacagaaatacaaactaccatcagagaatactgcaaacacctctatgcaaataaactagaaaatctagaagaaatggataaattcctcgacacatacaccctcccaagactaaaccaggaagaagttgaatctctgaatagaccaataacagactctgaaactgtggcaataatcaatagcttaccaaccaaaaagagtccaggaccagatggattcacagccgaattctaccagatgataacaaccccagtctttgcacaagctttgtataaagtggagattaatgaaaacacacttactggaacagatataatacaagtgttcgcagcagatggagatgaaggcacaaatggacaggttcgctatggcattgttaatggtaataccaatcaggaatttcggatagactctgtcacaggtgccatcactgtcgctaaacctttggatagagaaaagacccctacctaccatttaactgttcaggcaacagatcgaggcagcacacccagaactgatacctccacggtcagcattgttctactggatattaatgactttgttcctgtatttgagctatctccatattctgtaaatgtccctgagaatttagggacactacccagaacaattcttcagactgcttcgccttgcgtgaggtttgccagcgccagtaaagcgtatttcacaacaattcctgaggatgcaccaactggaacagatgttttattggtaaatgcctcagatgctgatgcttcaaagaatgcagttataagttataggatcatcggtggaaactctcagttcacgatcaacccatcgacaggacaaatcatcaccagcgcattgttagatagggaaacaaaagataattatactttggtagtggtctgcagtgatgcgggatccccagagcctctttccagttccaccagtgtgcttgtcactgtgactgatgtccatgacaatccaccaagatttcagcatcacccatatgtcactcacatcccatctcctactcttccaggttcctttgtctttgcggttacagtcacagatgctgatattggaccaaattctgaactgcattattctctttcgggtagaaattctgaaaaatttcacattgacccactgaggggagccattatggccgccggaccactaaacggagcttcagaagtgacattttctgtgcatgtaaaagatggtggctcatttccaaagacagattctacaacagtgactgttagattcgtgaataaggccgatttccctaaagtcagagccaaagaacaaacgttcatgtttcctgaaaaccaaccagtcagctctcttgtcaccaccatcacaggatcctctttaagaggagaacctatgtcatattatatcgcaagtgggaatcttggcaatactttccagattgatcagttaacagggcaggtgtctattagtcaacctctggattttgaaaagatacaaaaatatgttgtatggatagaggccagagacggtggtttccctcctttctcctcttacgagaaacttgatataacagtattagatgtcaatgataatgccccaatttttaaggaagacccatttatatctgaaatattggaaaacctttcccctcgaaaaatacttactgtttcggcaatggacaaggacagtggacccaatggacagttagattatgaaattgttaatggcaacatggaaaatagtttcagtatcaatcatgctactggtgaaattagaagcgttagacctttggacagggaaaaagtatctcattatgtcctaaccataaaatcatcagacaaagggtccccgtctcagagtacttcagtaaaagtcatgattaacattttagatgaaaatgataatgcccctaggttttctcagatatttagtgcccatgttcctgaaaattcccccttaggatacacagttacccgtgtcacaacttctgatgaagacattgggatcaatgcaattagtagatattctataatggatgcaagtcttccatttacaattaatcccagcacaggggatattgtcataagcagacctttaaatagggaagatacagaccgttacagaattcgagtttccgcacatgattctgggtggactgtaagtacagatgtcacaatatttgtgacagacatcaatgacaatgctccaagatttagcagaacttcctattatttagattgccctgaacttactgagattggctccaaagtaactcaggtatttgcaacagatcctgatgagggatcaaatggacaagtgttttatttcataaaatcccaatcagaatatttcaggattaatgccaccactggagagattttcaataaacagatcttaaaataccaaaatgtcactggcttcagtaatgtgaatatcaacaggcatagttttatagtgacatcttcagatcgaggtaaaccttccttaattagtgagacaacagttaccatcaatatagtggacagtaatgacaatgcacctcaatttcttaaaagtaaatatttcactccagtcaccaaaaatgttaaggttggtacgaagttaatcagagttacagcaatagatgacaaagattttggactgaattcagaagtggagtatttcatttctaatgataaccatttaggaaaatttaagttggacaatgatacggggtggatttcagtagcatcctccctgatttctgacttgaaccaaaacttttttatcacagtcactgcaaaggataagggaaaccctccactttcttcccaagcaactgttcacataactgtcactgaggaaaactaccatacacctgaattctctcaaagccacatgagtgcaaccatccctgagagccatagcattgggtccattgtcagaactgtttctgcaagagatagagatgcagcgatgaatggcttgattaagtacagcatttcttcaggaaatgaagaaggcatttttgcaatcaattcttctacaggtatattaacactagccaaagctcttgattatgagctatgccagaaacacgaaatgacgattagtgctatagatggaggatgggttgcaagaactggttactgcagtgtgaccgtaaatgtgattgatgtgaatgataattctccagtattcctctctgatgactatttccctactgttttggaaaatgccccaagtggaacaacagttatccacctaaatgcaacagatgctgactctggaacaaatgctgtgattgcgtatactgtacagtcatctgacagtgacctctttgtcattgaccctaacacaggagtcataaccactcaaggcttcttggattttgaaaccaagcagagctaccatcttactgtgaaagccttcaatgtccccgatgaggaaaggtgtagctttgccactgttaatatacaattaaaagggacaaatgaatatgtgccccgttttgtttccaaactttactattttgaaatctcagaagcagctcctaaaggtactattgttggagaagtgtttgctagcgaccgtgatttgggcactgatggggaggtacactatttgatttttggtaatagtcgaaagaagggtttccagatcaataagaagactggacagatttatgtttctggaattcttgatcgaaaaaaagaagaaagggtgtctttgaaggtattggccaagaactttggcagcattagaggtgcagatatagatgaggtcactgtaaatgtcaccgtgcttgatgcaaatgacccacccatttttactctaaacatctacagtgtgcagatcagtgaaggggtcccaataggaactcatgtgacctttgtcagtgcctttgactcagactccatccccagctggagcaggttttcttacttcatcggatcagggaatgaaaatggtgccttttctattaatccgcagacaggacagatcaccgttactgcagaattagatcgagaaacccttcccatctataatctctcagttttggctgttgattcagggaccccctcagctacaggtagtgcctctttattagtcaccctggaagatataaatgataacgggcccatgctgactgtcagtgaaggagaagtcatggaaaacaaacggccaggcactttggtgatgacccttcagtccactgaccctgatctccctccaaatcaaggtccctttacttattacttgctgagcacaggtcctgccaccagttatttcagtctgagcactgctggagttctgagcacaaccagagagattgacagagagcagattgcagacttctatctgtctgtggttaccaaggattctggtgttcctcaaatgtcttccacaggaactgtgcatatcacagttatagaccaaaatgacaatccttcacagtctcggacggtggagatatttgttaattattatggtaacttgtttcccggtgggattttaggctctgtgaagccacaggatccagatgtgttagacagcttccactgctcccttacttcaggagttaccagcctcttcagtattccagggggtacttgtgatctgaattcccagccaaggtccacagatggcacgtttgatctgactgtccttagcaatgatggagttcacagcacagtcacgagcaacatccgagttttctttgctggattttccaatgccacagtggataacagcatcttacttcgtctcggcgtaccaacagtaaaggacttcttgaccaaccactatcttcattttttacgcattgccagctcacagctgacaggcttagggactgctgtgcaactgtacagtgcatatgaagagaacaatagaacgtttcttttggcagctgtgaagcgaaatcataatcagtatgtgaatcccagtggcgtagccaccttctttgaaagcatcaaagagatccttctccggcagagtggagtaaaggtggaatctgtggatcatgactcctgtgtgcatggcccatgtcagaatggagggagctgtctacgaagattggctgtgagctccgtattaaaaagccgtgagagtcttccagtcatcatcgtggcaaatgaacctctgcagcctttcttatgcaagtgtctgccaggatatgcgggtagctggtgtgaaatagatatagatgaatgtcttccatcaccttgccacagtggtggaacctgtcacaatttagtgggaggattttcatgcagctgcccagatggcttcactggtagggcgtgtgagagagatatcaatgagtgcctgcagagtccttgcaagaatggtgccatctgccagaattttccaggaagcttcaactgtgtttgcaaaactggatacacaggtatgacaacgtttgtacttttctcactaagacttggaaaatgtgtgaatcttcagtcaattactgtgaatgcaacccctgctttaatggtggttcctgccaaagtggtgtggattcttattattgtcattgtccatttggtgtctttggaacactgcgagttgaacagttatggatttgaggagttatcatacatggaatttccaagcttggaccccaataacaactatatttatgtcaaatttgccacgattaaaagtcatgccttattgctttacaactatgacaaccagacaggcgaccgggctgagtttttggcccttgaaattgccgaagaaagactaagattctcttataatttaggcagtggtacatataagctcaccaccatgaagaaggtgtcagatggacattttcacactgtgattgccaggagagcaggaatggcagcctccttaactgtggactcctgttctgagaaccaagagccaggatattgtactgtcagtaatgtggcagtttcagatgactggactcttgatgttcagccaaatagagttacagttggaggtatcagatctctagaaccaatccttcagagaagaggacacgtggaaagccatgattttgttgggtgtataatggagtttgcagtcaatggaaggcctctggaacccagccaagctttggcagcacaaggcatcctagatcagtatggcgattttatttcttactgttttaaagaaaaaaaatgcaaaaaagtatgcttcactgttactcctgacactgccttatcattagaaggcaaagggcgcttggactaccacatgagtcagaatgagaagcgggaatatttgttaaggcaaagcttacgaggtgccatgttggagccttttggtgtgaacagtctggaagtaaaatttaggaccagaagcgagaatggcgttttaatccatatccaagaaagcagcaattacactactgtgaagggaatgtgtgaatcttcagtcaattactgtgaatgcaacccctgctttaatggtggttcctgccaaagtggtgtggattcttattattgtcattgtccatttggtgtctttggaaaacactgcgagttgaacagttatggatttgaggagttatcatacatggaatttccaagcttggaccccaataacaactatatttatgtcaaatttgccacgattaaaagtcatgccttattgctttacaactatgacaaccagacaggcgaccgggctgagtttttggcccttgaaattgccgaagaaagactaagattctcttataatttaggcagtggtacatataagctcaccaccatgaagaaggtgtcagatggacattttcacactgtgattgccaggagagcaggaatgactcttgatgttcagccaaatagagttacagttggaggtatcagatctctagaaccaatccttcagagaagaggacacgtggaaagccatgattttgttgggtgtataatggagtttgcagtcaatggaaggcctctggaacccagccaagctttggcagcacaaggcatcctagatcagtatggcgattttatttcttactgttttaaagaaaaaaaatgcaaaaagtatgcttcacttggcctccatctcgggaagcatagcttggcctccatctcaaaaacagatccctcagtgaagattggctgccgtggcccgaacatttgtgccagcaacccctgctggggtgatttgctgtgcattaatcagtggtatgcctacaggtgtgtccctcctggggactgtgcctcccacccgtgccagaatggtggcagctgtgagccaggcctgcactccggcttcacctgtagctgcccagactcgcacacgggaaggacctgtgagatggtggtggcctgtcttggcgtcctctgtcctcaggggaaggtgtgcaaagctggaagtcctgcggggcatgtctgtgttctgagtcagggccctgaagagatctctctgcctttgtgggctgtgcctgccatcgtgggcagctgcgcaaccgtcttggccctcctggtccttagcctgatcctgtgtaaccagtgcagggggaagaaggccaaaaatcccaaagaggagaagaaaccgaaggagaagaagaaaaagggaagtgagaacgttgcttttgatgaccctgacaatatccctccctatggggatgacatgactgtgaggaagcagcctgaagggaacccaaaaccagatatcattgaaagggaaaacccctaccttatctatgatgaaactgatattcctcacaactcagaaaccatccccagcgcccctttggcatctccagagcaggagatagagcactatgacattgacaacgccagcagcatcgccccttcggatgcagacatcattcaacactacaagcagttccgcagccacacaccaaaattttcaatccagaggcacagtcccctaggctttgcaaggcaatcccccatgcccttaggagcaagcagtttgacttaccagccttcatatggtcaaggtttgagaaccagctccctaagccactcagcatgcccaactcccaaccctctgtctcgacacagtccagcccctttctccaaatcttctacgttctatagaaacagcccagcaagggaattgcatcttcctataagggatggtaatactttggaaatgcatggtgacacctgccaacctggcattttcaactatgccacaaggctgggaaggagaagcaagagtcctcaggccatggcatcacatggttctagaccagggagtcgcctaaagcagccgattgggcagattccactggaatcttctcctccagtcggactttctattgaagaagtggagaggctcaacacacctcgccctagaaacccaagtatctgcagtgcagaccatgggaggtcttcttcagaggaggactgcagaaggccactgtctagaacaaggaatccagcggatggcattccagctccagaatcctcttctgatagtgactcccatgaatctttcacttgctcagaaatggaatatgacagggagaagccaatggtatatacttccagaatgcccaaattatctcaagtcaatgaatctgatgcagatgatgaagataattatggagccagactgaagcctcgaaggtaccacggtcgcagggccgagggaggacctgtgggcacccaggcagcagcaccaggcactgctgacaacacactgcccatgaagctagggcagcaagcagggactttcaactgggacaaccttttgaactggggccctggctttggccattatgtagatgtttttaaagatttggcatctcttccagaaaaagcagcagcaaatgaagaaggcaaagctgggacaactaaaccagtccccaaagatggggaagcagaacagtatgtgtgaagtttatgtactggcactataaaatataaaaacaagaaataatactcaaaccattgtaaagttgctgactaggttgggtcacatttgaaaaacaggccagtatggactagtggtggagggaaaactttaaaaataataaccacaatgctgctgaaacagactcacaacaactcttaatttaaacatgtgtggttgaattc

SEQ ID NO: 1132 - protein, 4961 aa, Homo sapiens [sequence omitted]

SEQ ID NO: 1133 - DNA, 3729 bp, Homo sapiens
  CDS (1)..(3729)
ggtacctatttcacaacaattcctgaggatgcaccaactggaacagatgttttattggtaaatgcctcagatgctgatgcttcaaagaatgcagttataagttataggatcatcggtggaaactctcagttcacgatcaacccatcgacaggacaaatcatcaccagcgcattgttagatagggaaacaaaagataattatactttggtagtggtctgcagtgatgcgggatccccagagcctctttccagttccaccagtgtgcttgtcactgtgactgatgtcaatgacaatccaccaagatttcagcatcacccatatgtcactcacatcccatctcctactcttccaggttcctttgtctttgcggttacagtcacagatgctaatattggaccaaattctgaactgcattattctctttcgggtagagattctgaaaaatttcacattgacccactgaggggagccattatggccgccggaccactaaacggagcttcagaagtgacattttctgtgcatgtaaaagatggtggctcatttccaaagacagattctacaacagtgactgttagattcgtgaataaggccgatttccctaaagtcagagccaaagaacaaacgttcatgtttcctgaaaaccaaccagtcagctctcttgtcaccaccatcacaggatcctctttaagaggagaacctatgtcatattatatcgcaagtgggaatcttggcaatactttccagattgatcagttaacagggcaggtgtctattagtcaacctctggattttgaaaagatacaaaaatatgttgtatggatagaggccagagacggtggtttccctcctttctcctcttacgagaaacttgatataacagtattagatgtcaatgataatgccccaatttttaaggaagacccatttatatctgaaatattggaaaacctttcccctcgaaaaatacttactgtttcggcaatggacaaggacagtggacccaatggacagttagattatgaaattgttaatggcaacatggaaaatagtttcagtatcaatcatgctactggtgaaattagaagcgttagacctttggacagggaaaaagtatctcattatgtcctaaccataaaatcatcagacaaagggtccccgtctcagagtacttcagtaaaagtcatgattaacattttagatgaaaatgataatgcccctaggttttctcagatatttagtgcccatgttcctgaaaattcccccttaggatacacagttacccgtgtcacaacttctgatgaagacattgggatcaatgcaattagtagatattctataatggatgcaagtcttccatttacaattaatcccaacacaggggatattgtcataagcagacctttaaatagggaagatacagaccgttacagaattcgagtttccgcacatgattctgggtggactgtaagtacagatgtcacaatatttgtgacagacatcaatgacaatgctccaagatttagcagaacttcctattatttagattgccctgaacttactgagattggctccaaagtaactcaggtatttgcaacagatcctgatgagggatcaaatggacaagtgttttatttcataaaatcccaatcagaatatttcaggattaatgccaccactggagagattttcaataaacagatcttaaaataccaaaatgtcactggcttcagtaatgtgaatatcaacaggcatagttttatagtgacatcttcagatcgaggtaaaccttccttaattagtgagacaacagttaccatcaatatagtggacagtaatgacaatgcacctcaatttcttaaaagtaaatatttcactccagtcaccaaaaatgttaaggttggtacgaagttaatcagagttacagcaatagatgacaaagattttggactgaattcagaagtggagtatttcatttctaatgataaccatttaggaaaatttaagttggacaatgatacggggtggatttcagtagcatcctccctgatttctgacttgaaccaaaacttttttatcacagtcactgcaaaggataagggaaaccctccactttcttcccaagcaactgttcacataactgtcactgaggaaaactaccatacacctgaattctctcaaagccacatgagtgcaaccatccctgagagccataacattgggtccattgtcagaactgtttctgcaagagatagagatgcagcgatgaatggcttgattaagtacagcatttcttcaggaaatgaagaaggcatttttgcaatcaattcttctacaggtatattaacactagccaaagctcttgattatgagctatgccagaaacacgaaatgacgattagtgctatagatggaggatgggttgcaagaactggttactgcagtgtgaccgtaaatgtgattgatgtgaatgataattctccagtattcctctctgatgactatttccctactgttttggaaaatgccccaagtggaacaacagttatccacctaaatgcaacagatgctgactctggaacaaatgctgtgattgcgtatactgtacagtcatctgacagtgacctctttgtcattgaccctaacacaggagtcataaccactcaaggcttcttggattttgaaaccaagcagagctaccatcttactgtgaaagccttcaatgtccccgatggggaaaggtgtagctttgccactgttaatatacaattaaaagggacaaatgaatatgtgccccgttttgtttccaaactttactattttgaaatctcagaagcagctcctaaaggtactattgttggagaagtgtttgctagcgaccgtgatttgggcactgatggggaggtacactatttgatttttggtaatagtcgaaagaagggtttccagatcaataagaagactggacagatttatgtttctggaattcttgatcgagaaaaagaagaaagggtgtctttgaaggtattggccaagaactttggcagcattagaggtgcagatatagatgaggtcactgtaaatgtcaccgtgcttgatgcaaatgacccacccatttttactctaaacatctacagtgtgcagatcagtgaaggggtcccaataggaactcatgtgacctttgtcagtgcctttgactcagactccatccccagctggagcaggttttcttacttcatcggatcagggaatgaaaatggtgccttttctattaatccgcagacaggacagatcaccgttactgcagaattagatcgagaaacccttcccatctataatctctcagttttggctgttgattcagggaccccctcagctacaggtagtgcctctttattagtcaccctggaagatataaatgataacgggcccatgctgaccgtcagtgaaggagaagtcatggaaaacaaacggccagacactttggtgatgacccttcagtccactgaccctgatctccctccaaatcaaggtccctttacttattacttgctgagcacgggtcctgccaccagttatttcagtctgagcactgctggagttctgagcacaaccagagagattgacagagagcagattgcagacttctatctgtctgtggttaccaaggattctggtgttcctcaaatgtcttccacaggaactgtgcatatcacagttatactcgag

SEQ ID NO: 1134 - protein, 1243 aa, Homo sapiens
GTYFTTIPEDAPTGTDVLLVNASDADASKNAVISYRIIGGNSQFTINPSTGQIITSALLDRETKDNYTLVVVCSDAGSPEPLSSSTSVLVTVTDVNDNPPRFQHHPYVTHIPSPTLPGSFVFAVTVTDANIGPNSELHYSLSGRDSEKFHIDPLRGAIMAAGPLNGASEVTFSVHVKDGGSFPKTDSTTVTVRFVNKADFPKVRAKEQTFMFPENQPVSSLVTTITGSSLRGEPMSYYIASGNLGNTFQIDQLTGQVSISQPLDFEKIQKYVVWIEARDGGFPPFSSYEKLDITVLDVNDNAPIFKEDPFISEILENLSPRKILTVSAMDKDSGPNGQLDYEIVNGNMENSFSINHATGEIRSVRPLDREKVSHYVLTIKSSDKGSPSQSTSVKVMINILDENDNAPRFSQIFSAHVPENSPLGYTVTRVTTSDEDIGINAISRYSIMDASLPFTINPNTGDIVISRPLNREDTDRYRIRVSAHDSGWTVSTDVTIFVTDINDNAPRFSRTSYYLDCPELTEIGSKVTQVFATDPDEGSNGQVFYFIKSQSEYFRINATTGEIFNKQILKYQNVTGFSNVNINRHSFIVTSSDRGKPSLISETTVTINIVDSNDNAPQFLKSKYFTPVTKNVKVGTKLIRVTAIDDKDFGLNSEVEYFISNDNHLGKFKLDNDTGWISVASSLISDLNQNFFITVTAKDKGNPPLSSQATVHITVTEENYHTPEFSQSHMSATIPESHNIGSIVRTVSARDRDAAMNGLIKYSISSGNEEGIFAINSSTGILTLAKALDYELCQKHEMTISAIDGGWVARTGYCSVTVNVIDVNDNSPVFLSDDYFPTVLENAPSGTTVIHLNATDADSGTNAVIAYTVQSSDSDLFVIDPNTGVITTQGFLDFETKQSYHLTVKAFNVPDGERCSFATVNIQLKGTNEYVPRFVSKLYYFEISEAAPKGTIVGEVFASDRDLGTDGEVHYLIFGNSRKKGFQINKKTGQIYVSGILDREKEERVSLKVLAKNFGSIRGADIDEVTVNVTVLDANDPPIFTLNIYSVQISEGVPIGTHVTFVSAFDSDSIPSWSRFSYFIGSGNENGAFSINPQTGQITVTAELDRETLPIYNLSVLAVDSGTPSATGSASLLVTLEDINDNGPMLTVSEGEVMENKRPDTLVMTLQSTDPDLPPNQGPFTYYLLSTGPATSYFSLSTAGVLSTTREIDREQIADFYLSVVTKDSGVPQMSSTGTVHITVILE

SEQ ID NO: 1135 - DNA, 3729 bp, Homo sapiens
  CDS (1)..(3729)
ggtacctatttcacaacaattcctgaggatgcaccaactggaacagatgttttattggtaaatgcctcagatgctgatgcttcaaagaatgcagttataagttataggatcatcggtggaaactctcagttcacgatcaacccatcgacaggacaaatcatcaccagcgcattgttagatagggaaacaaaagataattatgctttggtagtggtctgcagtgatgcgggatccccagagcctctttccagttccaccagtgtgcttgtcactgtgactgatgtcaatgacaatccaccaagatttcagcatcacccatatgtcactcacatcccatctcctactcttccaggttcctttgtctttgcggttacagtcacagatgctgatattggaccaaattctgaactgcattattctctttcgggtagaaattctgaaaaatttcacattgacccactgaggggagccattatggccgccggaccactaaacggagcttcagaagtgacattttctgtgcatgtaaaagatggtggctcatttccaaagacagattctacaacagtgactgttagattcgtgaataaggccgatttccctaaagtcagagccaaagaacaaacgttcatgtttcctgaaaaccaaccagtcagctctcttgtcaccaccatcacaggatcctctttaagaggagaacctatgtcatattatatcgcaagtgggaatcttggcaatactttccagattgatcagttaacagggcaggtgtctattagtcaacctctggattttgaaaagatacaaaaatatgttgtatggatagaggccagagacggtggtttccctcctttctcctcttacgagaaacttggtataacagtattagatgtcaatgataatgccccaatttttaaggaagacccatttatatctgaaatattggaaaacctttcccctcgaaaaatacttactgtttcggcaatggacaaggacagtggacccaatggacagttagattatgaaattgttaatggcaacatggaaaatagtttcagtatcaatcatgctactggtgaaattagaagcgttagacctttggacagggaaaaagtatctcattatgtcctaaccataaaatcatcagacaaagggtccccgtctcagagtacttcagtaaaagtcatgattaacattttagatgaaaatgataatgcccctaggttttctcagatatttagtgcccatgttcctgaaaattcccccttaggatacacagttacccgtgtcacaacttctgatgaagacattgggatcaatgcaattagtagatattctataatggatgcaagtcttccatttacaattaatcccagcacaggggatattgtcataagcagacctttaaatagggaagatacagaccgttacagaattcgagtttccgcacatgattctgggtggactgtaagtacagatgtcacaatatttgtgacagacatcaatgacaatgctccaagatttagcagaacttcctattatttagattgccctgaacttactgagattggctccaaagtaactcaggtatttgcaacagatcctgatgagggatcaaatggacaagtgttttatttcataaaatcccaatcagaatatttcaggattaatgccaccactggagagattttcaataaacagatcttaaaataccaaaatgtcactggcttcagtaatgtgaatatcaacaggcatagttttatagtgacatcttcagatcgaggtaaaccttccttaattagtgagacaacagttaccatcaatatagtggacagtaatgacaatgcacctcaatttcttaaaagtaaatatttcactccagtcaccaaaaatgttaaggttggtacgaagttaatcagagttacagcaatagatgacaaagattttggactgaattcagaagtggagtatttcatttctaatgataaccatttaggaaaatttaagttggacaatgatacggggtggatttcagtagcaccctccctgatttctgacttgaaccaaaacttttttatcacagtcactgcaaaggataagggaaaccctccactttcttcccaagcaactgttcacataactgtcgctgaggaaaactaccatacacctgaattctctcaaagccgcatgagtgcaaccatccctgagagccatagcattgggtccattgtcagaactgtttctgcaagagatagagatgcagcgatgaatggcttgattaagtacagcatttcttcaggaaatgaagaaggcatttttgcaatcaattcttctacaggtatattaacactagccaaagctcttgattatgagctatgccagaaacacgaaatgacgattagtgctatagatggaggatgggttgcaagaactggttactgcagtgtgaccgtaaatgtgattgatgtgaatgataattctccagtattcctctctgatgactatttccctactgttttggaaaatgccccaagtggaacaacagttatccacctaaatgcaacagatgctgactctggaacaaatgctgtgattgcgtatactgtacagtcatctgacagtgacctctttgtcattgaccctaacacaggagtcataaccactcaaggcttcttggattttgaaaccaagcagagctaccatcttactgtgaaagccttcaatgtccccgatgaggaaaggtgtagctttgccactgttaatatacaattaaaagggacaaatgaatatgtgccccgttttgtttccaaactttactattttgaaatctcagaagcagctcctaaaggtactattgttggagaagtgtttgctagcgaccgtgatttgggcactgatggggaggtacactatttgatttttggtaatagtcgaaaggagggtttccagatcaataagaagactggacagatttatgtttctggaattcttgatcgagaaaaagaagaaagggtgtctttgaaggtattggccaagaactttggcagcattagaggtgcagatatagatgaggtcactgtaaatgtcaccgtgcttgatgcaaatgacccacccatttttactctaaacatctacagtgtgcagatcagtgaaggggtcccaataggaactcatgtgacctttgtcagtgcctttgactcagactccatccccagctggagcaggttttcttacttcatcggatcagggaatgaaaatggtgccttttctattaatccgcagacaggacagatcaccgttactgcagaattagatcgagaaacccttcccatctataatctctcagttttggctgttgattcagggaccccctcagctacaggtagtgcctctttattagtcaccctggaagatataaatgataacgggcccatgctgactgtcagtgaaggagaagtcatggaaaacaaacggccaggcactttggtgatgacccttcagtccactgaccctgatctccctccaaatcaaggtccctttacttattacttgctgagcacaggtcctgccaccagttatttcagtctgagcactgctggagttctgagcacaaccagagagattgacagagagcagattgcagacttctatctgtctgtggttaccaaggattctggtgctcctcaaatgtcttccacaggaactgtgcatatcacagttatactcgag

SEQ ID NO: 1136 - protein, 1243 aa, Homo sapiens
GTYFTTIPEDAPTGTDVLLVNASDADASKNAVISYRIIGGNSQFTINPSTGQIITSALLDRETKDNYALVVVCSDAGSPEPLSSSTSVLVTVTDVNDNPPRFQHHPYVTHIPSPTLPGSFVFAVTVTDADIGPNSELHYSLSGRNSEKFHIDPLRGAIMAAGPLNGASEVTFSVHVKDGGSFPKTDSTTVTVRFVNKADFPKVRAKEQTFMFPENQPVSSLVTTITGSSLRGEPMSYYIASGNLGNTFQIDQLTGQVSISQPLDFEKIQKYVVWIEARDGGFPPFSSYEKLGITVLDVNDNAPIFKEDPFISEILENLSPRKILTVSAMDKDSGPNGQLDYEIVNGNMENSFSINHATGEIRSVRPLDREKVSHYVLTIKSSDKGSPSQSTSVKVMINILDENDNAPRFSQIFSAHVPENSPLGYTVTRVTTSDEDIGINAISRYSIMDASLPFTINPSTGDIVISRPLNREDTDRYRIRVSAHDSGWTVSTDVTIFVTDINDNAPRFSRTSYYLDCPELTEIGSKVTQVFATDPDEGSNGQVFYFIKSQSEYFRINATTGEIFNKQILKYQNVTGFSNVNINRHSFIVTSSDRGKPSLISETTVTINIVDSNDNAPQFLKSKYFTPVTKNVKVGTKLIRVTAIDDKDFGLNSEVEYFISNDNHLGKFKLDNDTGWISVAPSLISDLNQNFFITVTAKDKGNPPLSSQATVHITVAEENYHTPEFSQSRMSATIPESHSIGSIVRTVSARDRDAAMNGLIKYSISSGNEEGIFAINSSTGILTLAKALDYELCQKHEMTISAIDGGWVARTGYCSVTVNVIDVNDNSPVFLSDDYFPTVLENAPSGTTVIHLNATDADSGTNAVIAYTVQSSDSDLFVIDPNTGVITTQGFLDFETKQSYHLTVKAFNVPDEERCSFATVNIQLKGTNEYVPRFVSKLYYFEISEAAPKGTIVGEVFASDRDLGTDGEVHYLIFGNSRKEGFQINKKTGQIYVSGILDREKEERVSLKVLAKNFGSIRGADIDEVTVNVTVLDANDPPIFTLNIYSVQISEGVPIGTHVTFVSAFDSDSIPSWSRFSYFIGSGNENGAFSINPQTGQITVTAELDRETLPIYNLSVLAVDSGTPSATGSASLLVTLEDINDNGPMLTVSEGEVMENKRPGTLVMTLQSTDPDLPPNQGPFTYYLLSTGPATSYFSLSTAGVLSTTREIDREQIADFYLSVVTKDSGAPQMSSTGTVHITVILE

SEQ ID NO: 1137 - DNA, 1392 bp, Homo sapiens
  CDS (1)..(1392)
ggtacctttgccacgattaaaagtcatgccttattgctttacaactatgacaaccagacaggcgaccgggctgagtttttggcccttgaaattgccgaagaaagactaagattctcttataatttaggcagtggtacatataagctcaccaccatgaagaaggtgtcagatggacattttcacactgtgattgccaggagagcaggaatggcagcctccttaactgtggactcctgttctgagaaccaagagccaggatattgtactgtcagtaatgtggcagtttcagatgactggactcttgatgttcagccaaatagagttacagttggaggtatcagatctctagaaccaatccttcagagaagaggacacgtggaaagccatgattttgttgggtgtataatggagtttgcagtcaatggaaggcctctggaacccagccaagctttggcagcacaaggcatcctagatcaatgccctaggctggaaggcgcttgtactcgcagcccatgccaacatggtggcacatgtatggattactggtcatggcagcagtgtcattgcaaagagggactcactgggaaatactgtgaaaaatctgttactcctgacactgccttatcattagaaggcaaagggcgcttggactaccacatgagtcagaatgagaagcgggaatatttgttaaggcaaagcttacgaggtgccatgttggagccttttggtgtgaacagtctggaagtaaaatttaggaccagaagcgagaatggcgttttaatccatatccaagaaagcagcaattacactactgtgaagattaagaatggcaaagtatattttacatccgatgcaggaattgctgggaaagtggagagaaatattcctgaagtatatgttgcagacggccactggcacacttttctaattgggaaaaatggaacagcaacagtattgtctgttgacagaatatataacagagatattatccaccctactcaggacttcggtggccttgatgtgcttactatatcacttggaggaattccacccaatcaagcacatcgagatgcccaaacaggttttgatggctgcattgcttctatgtggtatggtggagaaagtcttcctttcagcgggaagcatagcttggcctccatctcaaaaacagatccctcagtgaagattggctgccgtggcccgaacatttgtgccagcaacccctgctggggtgatttgctgtgcattaatcagtggtatgcctacaggtgtgtccctcctggggactgtgcctcccacccgtgccagaatggtggcagctgtgagccaggcctgcactccggcttcacctgtagctgcccagactcgcacacgggaaggacctgtctcgag

SEQ ID NO: 1138 - protein, 464 aa, Homo sapiens
GTFATIKSHALLLYNYDNQTGDRAEFLALEIAEERLRFSYNLGSGTYKLTTMKKVSDGHFHTVIARRAGMAASLTVDSCSENQEPGYCTVSNVAVSDDWTLDVQPNRVTVGGIRSLEPILQRRGHVESHDFVGCIMEFAVNGRPLEPSQALAAQGILDQCPRLEGACTRSPCQHGGTCMDYWSWQQCHCKEGLTGKYCEKSVTPDTALSLEGKGRLDYHMSQNEKREYLLRQSLRGAMLEPFGVNSLEVKFRTRSENGVLIHIQESSNYTTVKIKNGKVYFTSDAGIAGKVERNIPEVYVADGHWHTFLIGKNGTATVLSVDRIYNRDIIHPTQDFGGLDVLTISLGGIPPNQAHRDAQTGFDGCIASMWYGGESLPFSGKHSLASISKTDPSVKIGCRGPNICASNPCWGDLLCINQWYAYRCVPPGDCASHPCQNGGSCEPGLHSGFTCSCPDSHTGRTCLE

SEQ ID NO: 1139 - DNA, 1403 bp, Homo sapiens
  CDS (1)..(1401)
ggtacctttgccacgattaaaagtcatgccttattgctttacaactatgacaaccagacaggcgaccgggctgagtttttggcccttgaaattgccgaagaaagactaagattctcttataatttaggcagtggtacatataagctcaccaccatgaagaaggtgtcagatggacattttcacactgtgattgccaggagagcaggaatggcagcctccttaactgtggactcctgttctgagaaccaagagccaggatattgtactgtcagtaatgtggcagtttcagatgactggactcttgatgttcagccaaatagagttacagttggaggtatcagatctctagaaccaatccttcagagaagaggacacgtggaaagccatgattttgttgggtgtataatggagtttgcagtcaatggaaggcctctggaacccagccaagctttggcagcacaaggcatcctagatcaatgccctaggctggaaggcgcttgtactcgcagcccatgccaacatggtggcacatgtatggattactggtcatggcagcagtgtcattgcaaagagggactcactgggaaatactgtgaaaaatctgttactcctgacactgccttatcattagaaggcaaagggcgcttggactaccacatgagtcagaatgagaagcgggaatatttgttaaggcaaagcttacgaggtgccatgttggagccttttggtgtgaacagtctggaagtaaaatttaggaccagaagcgagaatggcgttttaatccatatccaagaaagcagcaattacactactgtgaagattaagaatggcaaagtatattttacatccgatgcaggaattgctgggaaagtggagagaaatattcctgaagtatatgttgcagacggccactggcacacttttctaattgggaaaaatggaacagcaacagtattgtctgttgacagaatatataacagagatattatccaccctactcagtacttcggtggccttgatgtgcttactatatcacttggaggaattccacccaatcaagcacatcgagatgcccaaacagcaggttttgatggctgcattgcttctatgtggtatggtggagaaagtcttcctttcagcgggaagcatagcttggcctccatctcaaaaacagatccctcagtgaagattggctgccgtggcccgaacatttgtgccagcaacccctgctggggtgatttgctgtgcattaatcagtggtatgcctacaggtgtgtccctcctggggactgtgcctcccacccgtgccagaatggtggcagctgtgagccaggcctgcactccggcttcacctgtagctgcccagactcgcacacgggaaggacctgtctcgagaagggcga

SEQ ID NO: 1140 - protein, 467 aa, Homo sapiens
GTFATIKSHALLLYNYDNQTGDRAEFLALEIAEERLRFSYNLGSGTYKLTTMKKVSDGHFHTVIARRAGMAASLTVDSCSENQEPGYCTVSNVAVSDDWTLDVQPNRVTVGGIRSLEPILQRRGHVESHDFVGCIMEFAVNGRPLEPSQALAAQGILDQCPRLEGACTRSPCQHGGTCMDYWSWQQCHCKEGLTGKYCEKSVTPDTALSLEGKGRLDYHMSQNEKREYLLRQSLRGAMLEPFGVNSLEVKFRTRSENGVLIHIQESSNYTTVKIKNGKVYFTSDAGIAGKVERNIPEVYVADGHWHTFLIGKNGTATVLSVDRIYNRDIIHPTQYFGGLDVLTISLGGIPPNQAHRDAQTAGFDGCIASMWYGGESLPFSGKHSLASISKTDPSVKIGCRGPNICASNPCWGDLLCINQWYAYRCVPPGDCASHPCQNGGSCEPGLHSGFTCSCPDSHTGRTCLEKG

SEQ ID NO: 1141 - DNA, 14943 bp, Homo sapiens
  CDS (2)..(14740)
gttccaagtgctggaagagcaacctccaggcactctggtaggcaccatccagacgcgccccggcttcacctacaggctcagcgaaagccacgccctgtttgccataaacagtagcaccggagccctgtacaccacctccaccatcgaccgcgagagcctgcccagcgacgtgatcaacctggtggtcctttccagcgcgcccacctaccccaccgaagtgcgagtgctggtgcgggacctcaatgacaacgcccccgttttcccggacccctctatcgtggtcactttcaaggaagacagtagcagcggacgccaagtcatcttagacaccgccaccgactcggacatcggctcaaacggtgtggaccaccgctcctaccgcatcatccgcggcaatgaggcggggcgcttccgtctggacatcaacctgaacccgagcggcgagggagcgttcctgcatctggtgtccaagggcggactggaccgtgaggtcactccgcagtaccagctcctggttgaggtggaggacaagggtgagcctaagcggcggggctaccttcaggtaaacgtgactgtgcaagacattaatgacaaccccccggtttttggcagttctcactaccaggcgggggtgcctgaggacgcggttgtgggttccagcgtcctccaggtggcggcggcggacgcggacgagggcaccaacgcggacatccgctatcgcctgcaggacgaggggacccccttccaaatggaccctgagacgggacttatcacggtgcgggagcccctggacttcgaagctcggcgccaatactcgcttacggtgcaggcgatggacagaggcgtgccttccctcactgggcgcgccgaggcgctgattcagctgctggacgtgaatgacaatgacccggtagtgaagttccgctacttcccggccacctcgcgctacgcctcggtagatgagaatgctcaagtgggcaccgtggtggctctgctcaccgtgacggacgcagattctcccgcggccaacgggaacatctccgtgcaaattctcgggggcaatgagcagcgccactttgaagtgcaaagcagcaaagtgccgaacctgagcctaatcaaggtggccagcgccttggaccgcgagcgcatcccttcctacaacctcacagtttccgtctctgataactacggggcgccccctggcgcagcagtccaggcgcgctcttctgtggcaagcctggtgatttttgttaatgacatcaatgaccatcctcctgtcttttcacagcaagtgtacagagtgaacctgagcgaggaggcgcctccgggaagctatgtgagtgggatatctgccactgatggcgactctggtctcaatgctaatctgcgttacagcattgtctctggcaatggactgggatggttccatatcagtgaacatagcggcctcgtgaccactgggtcctctgggggcctggaccgtgaacttgcttcccagattgttctgaatataagtgcccgggaccagggagttcaccccaaggtgtcctatgcccagcttgtagtaactctcctagatgtgaatgatgaaaagccagtatttagccagccagaagggtatgatgtgtctgtggttgagaatgccccaacagggacagaactgttgatgctcagggcaactgacggggacctgggtgacaacggaacagtgcgcttctccttacaagaggcagagactgaccggaggtccttccgtctggatcctgtgtctgggaggttgagtactatttcctccttggacagagaagagcaagccttctactccctgttggttctggccacagatctgggctcccctccccagtcatcaatggctcgcataaatgtgagtcttctggatataaatgataacagccctgtcttctacccggtccaatactttgctcacattaaggagaatgagcctggaggtagctacatcaccactgtgtctgccactgacccagacttgggtaccaatggtactgtcaaatatagcatatctgctggggacaggtctcggtttcaggtcaatgctcagagtggggttatttctacaagaatggccctagacagagaagaaaaaacagcttatcagttgcaaatagtagctactgatggtggcaatttacaatctcccaaccaggcaatagtaaccatcactgtattggacactcaagacaacccacctgtattcagtcaggttgcctacagctttgtggtttttgagaacgtggcgctgggatatcatgtgggtagtgtgtctgcatccaccatggatctcaattccaacatcagttatctcattactactggggatcagaaaggtatgtttgctatcaaccaggtcactgggcagcttaccacagcaaatgtgattgatagagaagagcaatccttttatcagctgaaggtagtggccagtgggggcacagtgactggagacactatggttaacataacagttaaggatttgaatgacaactctccccatttccttcaggcaatagagagtgtaaatgtggtggagaattggcaggcaggtcacagcattttccaggccaaagctgtggaccctgatgaaggtgtcaatggcatggtactctatagtctgaagcaaaaccccaagaacctgtttgctatcaatgaaaagaatggcactattagtctgcttgggcccctggatgttcatgctggctcctaccaaatagagatcttggcatctgacatgggtgtcccacagctctcctctagtgtcatcctaacagtttatgtccatgatgtaaatgacaattcaccagtgtttgaccaactctcttatgaagtcaccctttctgagtcagaacctgtgaattctcgattctttaaagtacaagcttctgataaggattcaggagcaaatgatggtcaattgtatataaaaagtgaactggaccgtgaacttcaagacagatatgttttaatggttgttgcttctgacagagcagtggaaccccttagtgctactgtgaatgttactgtaattttagaagatgtaaatgataacagacctctttttaacagtaccaattacacattttacttcgaagaagagcagagggctgggtcgtttgtgggcaaagtaagtgctgtagataaagactttgggccaaatggagaagtaaggtattcttttgaaatggtgcagccagattttgagttgcatgccatcagtggggaaattacaaatactcatcagtttgacagggagtctcttatgaggcggagagggactgctgtgtttagctttacagtcatagcaacagatcaggggatccctcagcctctcaaggatcaggccactgtacatgtttacatgaaggatataaatgataatgctcccaaatttttaaaagacttttaccaagctacaatatcagaatcagcagccaatctgacacaagtgttaagagtatctgcctcagatgttgatgaaggtaataatggacttattcactattctataataaaaggaaatgaagaaagacagtttgctatagacagtacctctggtcaggtaacactaattggcaaattagactatgaagcaacacctgcctattcccttgtaattcaagcagtggattcagggacaatccccctcaattcaacgtgtactttaaatattgatattttagatgaaaatgacaataccccttctttccttaaatcaacactgtttgttgatgttttggaaaacatgagaattggtgaactcgtgtcctctgttactgcaactgattccgattcaggtgacaatgttgatttatattacagtattactgggactaacaaccacggaacttttagcattagcccaaacactgggagtatttttcttgccaaaaaactggactttgaaacacagtctttgtataaattaaatataacagcaaaagaccaaggaagacctcctcgttcatctacaatgtcagtggttattcacgtgagggactttaatgacaatcctcctagctttcctcctggagatattttcaagtctattgttgagaacattcccattggtacatctgtcatttcagtgactgcacatgaccctgatgcagacattaatggtcaactatcctacacaatcattcaacagatgccaagaggcaaccactttaccatagatgaagtcaaagggactatatatactaatgctgaaatagatcgggaatttgctaatctctttgagttgactgtaaaagccaatgatcaagctgtgccaatagaaactagacggtatgctttgaagaacgtgaccattttggttacagacctcaatgacaatgtcccaatgtttatatcacaaaacgcccttgctgcagacccatcagctgtgattggttccgttctgacaacaattatggctgctgacccagatgaaggtgctaatggagaaatagagtatgagatcatcaatggggacacagacaccttcattgttgatcgttatagtggagacctgagagtggcttcagcgttggtgccttcacagttgatctacaatctcatagtttcagcaacagaccttgggcctgaaaggaggaaatcgaccactgaattgaccatcattcttcagggccttgatggacctgtttttactcaacccaaatatataactattttgaaggaaggagaacccattggcacaaacgtgatatcaatagaagcagctagccccagaggatctgaggccccagtggagtattatattgtttcagttcgttgtgaagaaaaaactgttggacgcctctttactattggacgacatactggtataattcagaccgcagccattctggaccgggagcaaggagcatgtctttacctggtggatgtttatgccatagaaaaatcaactgcttttcccagaacacagagagcagaggtagaaacaacacttcaggatatcaatgacaatccaccagtatttccaacggacatgctggatctcacggtagaggagaacattggagatggctctaagattatgcagctgacagccatggatgctgacgaggtgcaaatgctctcgtcacatacactatcattagtgggttctttggtagcagccattttagccacggatgatgactctggtgtgaatggagaaattacatatattgtgaatgaagatgatgaagatggcatctttttcctgaatcctattactggggtctttaatttgactcgattattagattatgaagtacagcaatattatatcctcactgttcgagcagaagatggtgggggacaatttactaccatcagagtttatttcaatattctagatgtaaatgataatccacctattttcagcttgaattcatacagcacatctttaatggagaatctacctgtgggatctactgttcttgtgtttaatgttactgatgcagatatgatgaaggcagaaataaagatgttctttgaaaccagtgagaacaaagacacaacataccagaatctctgggacacattcaaagcagtgtgtagagggaaatttatagcactaaatgcccacaagagaaagcaggaaagatccaaaattgacaccctaacatcacaattaaaagaactagaaaagcaagagcaaacacattcaaaagctagcagaaggcaagaaataactaaaatcagagcagaactgaaggatatagagacacaaaaaacccttcaaaaaattaatgaatccaggagctggttttttgaaaggatcaacaaaattgatagaccgctagcaagactaataaagaagaaaacagagaagaatcaaatagacgcaataaaaaatgataaaggggatatcaccatcgatcccacagaaatacaaactaccatcagagaatactgcaaacacctctatgcaaataaactagaaaatctagaagaaatggataaattcctcgacacatacaccctcccaagactaaaccaggaagaagttgaatctctgaatagaccaataacagactctgaaactgtggcaataatcaatagcttaccaaccaaaaagagtccaggaccagatggattcacagccgaattctaccagatgataacaaccccagtctttgcacaagctttgtataaagtggagattaatgaaaacacacttactggaacagatataatacaagtgttcgcagcagatggagatgaaggcacaaatggacaggttcgctatggcattgttaatggtaataccaatcaggaatttcggatagactctgtcacaggtgccatcactgtcgctaaacctttggatagagaaaagacccctacctaccatttaactgttcaggcaacagatcgaggcagcacacccagaactgatacctccacggtcagcattgttctactggatattaatgactttgttcctgtatttgagctatctccatattctgtaaatgtccctgagaatttagggacactacccagaacaattcttcagactgcttcgccttgcgtgaggtttgccagcgccagtaaagcgtatttcacaacaattcctgaggatgcaccaactggaacagatgttttattggtaaatgcctcagatgctgatgcttcaaagaatgcagttataagttataggatcatcggtggaaactctcagttcacgatcaacccatcgacaggacaaatcatcaccagcgcattgttagatagggaaacaaaagataattatactttggtagtggtctgcagtgatgcgggatccccagagcctctttccagttccaccagtgtgcttgtcactgtgactgatgtccatgacaatccaccaagatttcagcatcacccatatgtcactcacatcccatctcctactcttccaggttcctttgtctttgcggttacagtcacagatgctgatattggaccaaattctgaactgcattattctctttcgggtagaaattctgaaaaatttcacattgacccactgaggggagccattatggccgccggaccactaaacggagcttcagaagtgacattttctgtgcatgtaaaagatggtggctcatttccaaagacagattctacaacagtgactgttagattcgtgaataaggccgatttccctaaagtcagagccaaagaacaaacgttcatgtttcctgaaaaccaaccagtcagctctcttgtcaccaccatcacaggatcctctttaagaggagaacctatgtcatattatatcgcaagtgggaatcttggcaatactttccagattgatcagttaacagggcaggtgtctattagtcaacctctggattttgaaaagatacaaaaatatgttgtatggatagaggccagagacggtggtttccctcctttctcctcttacgagaaacttgatataacagtattagatgtcaatgataatgccccaatttttaaggaagacccatttatatctgaaatattggaaaacctttcccctcgaaaaatacttactgtttcggcaatggacaaggacagtggacccaatggacagttagattatgaaattgttaatggcaacatggaaaatagtttcagtatcaatcatgctactggtgaaattagaagcgttagacctttggacagggaaaaagtatctcattatgtcctaaccataaaatcatcagacaaagggtccccgtctcagagtacttcagtaaaagtcatgattaacattttagatgaaaatgataatgcccctaggttttctcagatatttagtgcccatgttcctgaaaattcccccttaggatacacagttacccgtgtcacaacttctgatgaagacattgggatcaatgcaattagtagatattctataatggatgcaagtcttccatttacaattaatcccagcacaggggatattgtcataagcagacctttaaatagggaagatacagaccgttacagaattcgagtttccgcacatgattctgggtggactgtaagtacagatgtcacaatatttgtgacagacatcaatgacaatgctccaagatttagcagaacttcctattatttagattgccctgaacttactgagattggctccaaagtaactcaggtatttgcaacagatcctgatgagggatcaaatggacaagtgttttatttcataaaatcccaatcagaatatttcaggattaatgccaccactggagagattttcaataaacagatcttaaaataccaaaatgtcactggcttcagtaatgtgaatatcaacaggcatagttttatagtgacatcttcagatcgaggtaaaccttccttaattagtgagacaacagttaccatcaatatagtggacagtaatgacaatgcacctcaatttcttaaaagtaaatatttcactccagtcaccaaaaatgttaaggttggtacgaagttaatcagagttacagcaatagatgacaaagattttggactgaattcagaagtggagtatttcatttctaatgataaccatttaggaaaatttaagttggacaatgatacggggtggatttcagtagcatcctccctgatttctgacttgaaccaaaacttttttatcacagtcactgcaaaggataagggaaaccctccactttcttcccaagcaactgttcacataactgtcactgaggaaaactaccatacacctgaattctctcaaagccacatgagtgcaaccatccctgagagccatagcattgggtccattgtcagaactgtttctgcaagagatagagatgcagcgatgaatggcttgattaagtacagcatttcttcaggaaatgaagaaggcatttttgcaatcaattcttctacaggtatattaacactagccaaagctcttgattatgagctatgccagaaacacgaaatgacgattagtgctatagatggaggatgggttgcaagaactggttactgcagtgtgaccgtaaatgtgattgatgtgaatgataattctccagtattcctctctgatgactatttccctactgttttggaaaatgccccaagtggaacaacagttatccacctaaatgcaacagatgctgactctggaacaaatgctgtgattgcgtatactgtacagtcatctgacagtgacctctttgtcattgaccctaacacaggagtcataaccactcaaggcttcttggattttgaaaccaagcagagctaccatcttactgtgaaagccttcaatgtccccgatgaggaaaggtgtagctttgccactgttaatatacaattaaaagggacaaatgaatatgtgccccgttttgtttccaaactttactattttgaaatctcagaagcagctcctaaaggtactattgttggagaagtgtttgctagcgaccgtgatttgggcactgatggggaggtacactatttgatttttggtaatagtcgaaagaagggtttccagatcaataagaagactggacagatttatgtttctggaattcttgatcgaaaaaaagaagaaagggtgtctttgaaggtattggccaagaactttggcagcattagaggtgcagatatagatgaggtcactgtaaatgtcaccgtgcttgatgcaaatgacccacccatttttactctaaacatctacagtgtgcagatcagtgaaggggtcccaataggaactcatgtgacctttgtcagtgcctttgactcagactccatccccagctggagcaggttttcttacttcatcggatcagggaatgaaaatggtgccttttctattaatccgcagacaggacagatcaccgttactgcagaattagatcgagaaacccttcccatctataatctctcagttttggctgttgattcagggaccccctcagctacaggtagtgcctctttattagtcaccctggaagatataaatgataacgggcccatgctgactgtcagtgaaggagaagtcatggaaaacaaacggccaggcactttggtgatgacccttcagtccactgaccctgatctccctccaaatcaaggtccctttacttattacttgctgagcacaggtcctgccaccagttatttcagtctgagcactgctggagttctgagcacaaccagagagattgacagagagcagattgcagacttctatctgtctgtggttaccaaggattctggtgttcctcaaatgtcttccacaggaactgtgcatatcacagttatagaccaaaatgacaatccttcacagtctcggacggtggagatatttgttaattattatggtaacttgtttcccggtgggattttaggctctgtgaagccacaggatccagatgtgttagacagcttccactgctcccttacttcaggagttaccagcctcttcagtattccagggggtacttgtgatctgaattcccagccaaggtccacagatggcacgtttgatctgactgtccttagcaatgatggagttcacagcacagtcacgagcaacatccgagttttctttgctggattttccaatgccacagtggataacagcatcttacttcgtctcggcgtaccaacagtaaaggacttcttgaccaaccactatcttcattttttacgcattgccagctcacagctgacaggcttagggactgctgtgcaactgtacagtgcatatgaagagaacaatagaacgtttcttttggcagctgtgaagcgaaatcataatcagtatgtgaatcccagtggcgtagccaccttctttgaaagcatcaaagagatccttctccggcagagtggagtaaaggtggaatctgtggatcatgactcctgtgtgcatggcccatgtcagaatggagggagctgtctacgaagattggctgtgagctccgtattaaaaagccgtgagagtcttccagtcatcatcgtggcaaatgaacctctgcagcctttcttatgcaagtgtctgccaggatatgcgggtagctggtgtgaaatagatatagatgaatgtcttccatcaccttgccacagtggtggaacctgtcacaatttagtgggaggattttcatgcagctgcccagatggcttcactggtagggcgtgtgagagagatatcaatgagtgcctgcagagtccttgcaagaatggtgccatctgccagaattttccaggaagcttcaactgtgtttgcaaaactggatacacaggtatgacaacgtttgtacttttctcactaagacttggaaaatgtgtgaatcttcagtcaattactgtgaatgcaacccctgctttaatggtggttcctgccaaagtggtgtggattcttattattgtcattgtccatttggtgtctttggaacactgcgagttgaacagttatggatttgaggagttatcatacatggaatttccaagcttggaccccaataacaactatatttatgtcaaatttgccacgattaaaagtcatgccttattgctttacaactatgacaaccagacaggcgaccgggctgagtttttggcccttgaaattgccgaagaaagactaagattctcttataatttaggcagtggtacatataagctcaccaccatgaagaaggtgtcagatggacattttcacactgtgattgccaggagagcaggaatggcagcctccttaactgtggactcctgttctgagaaccaagagccaggatattgtactgtcagtaatgtggcagtttcagatgactggactcttgatgttcagccaaatagagttacagttggaggtatcagatctctagaaccaatccttcagagaagaggacacgtggaaagccatgattttgttgggtgtataatggagtttgcagtcaatggaaggcctctggaacccagccaagctttggcagcacaaggcatcctagatcagtatggcgattttatttcttactgttttaaagaaaaaaaatgcaaaaaagtatgcttcactgttactcctgacactgccttatcattagaaggcaaagggcgcttggactaccacatgagtcagaatgagaagcgggaatatttgttaaggcaaagcttacgaggtgccatgttggagccttttggtgtgaacagtctggaagtaaaatttaggaccagaagcgagaatggcgttttaatccatatccaagaaagcagcaattacactactgtgaagggaatgtgtgaatcttcagtcaattactgtgaatgcaacccctgctttaatggtggttcctgccaaagtggtgtggattcttattattgtcattgtccatttggtgtctttggaaaacactgcgagttgaacagttatggatttgaggagttatcatacatggaatttccaagcttggaccccaataacaactatatttatgtcaaatttgccacgattaaaagtcatgccttattgctttacaactatgacaaccagacaggcgaccgggctgagtttttggcccttgaaattgccgaagaaagactaagattctcttataatttaggcagtggtacatataagctcaccaccatgaagaaggtgtcagatggacattttcacactgtgattgccaggagagcaggaatgactcttgatgttcagccaaatagagttacagttggaggtatcagatctctagaaccaatccttcagagaagaggacacgtggaaagccatgattttgttgggtgtataatggagtttgcagtcaatggaaggcctctggaacccagccaagctttggcagcacaaggcatcctagatcagtatggcgattttatttcttactgttttaaagaaaaaaaatgcaaaaagtatgcttcacttggcctccatctcgggaagcatagcttggcctccatctcaaaaacagatccctcagtgaagattggctgccgtggcccgaacatttgtgccagcaacccctgctggggtgatttgctgtgcattaatcagtggtatgcctacaggtgtgtccctcctggggactgtgcctcccacccgtgccagaatggtggcagctgtgagccaggcctgcactccggcttcacctgtagctgcccagactcgcacacgggaaggacctgtgagatggtggtggcctgtcttggcgtcctctgtcctcaggggaaggtgtgcaaagctggaagtcctgcggggcatgtctgtgttctgagtcagggccctgaagagatctctctgcctttgtgggctgtgcctgccatcgtgggcagctgcgcaaccgtcttggccctcctggtccttagcctgatcctgtgtaaccagtgcagggggaagaaggccaaaaatcccaaagaggagaagaaaccgaaggagaagaagaaaaagggaagtgagaacgttgcttttgatgaccctgacaatatccctccctatggggatgacatgactgtgaggaagcagcctgaagggaacccaaaaccagatatcattgaaagggaaaacccctaccttatctatgatgaaactgatattcctcacaactcagaaaccatccccagcgcccctttggcatctccagagcaggagatagagcactatgacattgacaacgccagcagcatcgccccttcggatgcagacatcattcaacactacaagcagttccgcagccacacaccaaaattttcaatccagaggcacagtcccctaggctttgcaaggcaatcccccatgcccttaggagcaagcagtttgacttaccagccttcatatggtcaaggtttgagaaccagctccctaagccactcagcatgcccaactcccaaccctctgtctcgacacagtccagcccctttctccaaatcttctacgttctatagaaacagcccagcaagggaattgcatcttcctataagggatggtaatactttggaaatgcatggtgacacctgccaacctggcattttcaactatgccacaaggctgggaaggagaagcaagagtcctcaggccatggcatcacatggttctagaccagggagtcgcctaaagcagccgattgggcagattccactggaatcttctcctccagtcggactttctattgaagaagtggagaggctcaacacacctcgccctagaaacccaagtatctgcagtgcagaccatgggaggtcttcttcagaggaggactgcagaaggccactgtctagaacaaggaatccagcggatggcattccagctccagaatcctcttctgatagtgactcccatgaatctttcacttgctcagaaatggaatatgacagggagaagccaatggtatatacttccagaatgcccaaattatctcaagtcaatgaatctgatgcagatgatgaagataattatggagccagactgaagcctcgaaggtaccacggtcgcagggccgagggaggacctgtgggcacccaggcagcagcaccaggcactgctgacaacacactgcccatgaagctagggcagcaagcagggactttcaactgggacaaccttttgaactggggccctggctttggccattatgtagatgtttttaaagatttggcatctcttccagaaaaagcagcagcaaatgaagaaggcaaagctgggacaactaaaccagtccccaaagatggggaagcagaacagtatgtgtgaagtttatgtactggcactataaaatataaaaacaagaaataatactcaaaccattgtaaagttgctgactaggttgggtcacatttgaaaaacaggccagtatggactagtggtggagggaaaactttaaaaataataaccacaatgctgctgaaacagactcacaacaactcttaatttaaacatgtgtggttgaattc

SEQ ID NO: 1142 - protein, 4913 aa, Homo sapiens
FQVLEEQPPGTLVGTIQTRPGFTYRLSESHALFAINSSTGALYTTSTIDRESLPSDVINLVVLSSAPTYPTEVRVLVRDLNDNAPVFPDPSIVVTFKEDSSSGRQVILDTATDSDIGSNGVDHRSYRIIRGNEAGRFRLDINLNPSGEGAFLHLVSKGGLDREVTPQYQLLVEVEDKGEPKRRGYLQVNVTVQDINDNPPVFGSSHYQAGVPEDAVVGSSVLQVAAADADEGTNADIRYRLQDEGTPFQMDPETGLITVREPLDFEARRQYSLTVQAMDRGVPSLTGRAEALIQLLDVNDNDPVVKFRYFPATSRYASVDENAQVGTVVALLTVTDADSPAANGNISVQILGGNEQRHFEVQSSKVPNLSLIKVASALDRERIPSYNLTVSVSDNYGAPPGAAVQARSSVASLVIFVNDINDHPPVFSQQVYRVNLSEEAPPGSYVSGISATDGDSGLNANLRYSIVSGNGLGWFHISEHSGLVTTGSSGGLDRELASQIVLNISARDQGVHPKVSYAQLVVTLLDVNDEKPVFSQPEGYDVSVVENAPTGTELLMLRATDGDLGDNGTVRFSLQEAETDRRSFRLDPVSGRLSTISSLDREEQAFYSLLVLATDLGSPPQSSMARINVSLLDINDNSPVFYPVQYFAHIKENEPGGSYITTVSATDPDLGTNGTVKYSISAGDRSRFQVNAQSGVISTRMALDREEKTAYQLQIVATDGGNLQSPNQAIVTITVLDTQDNPPVFSQVAYSFVVFENVALGYHVGSVSASTMDLNSNISYLITTGDQKGMFAINQVTGQLTTANVIDREEQSFYQLKVVASGGTVTGDTMVNITVKDLNDNSPHFLQAIESVNVVENWQAGHSIFQAKAVDPDEGVNGMVLYSLKQNPKNLFAINEKNGTISLLGPLDVHAGSYQIEILASDMGVPQLSSSVILTVYVHDVNDNSPVFDQLSYEVTLSESEPVNSRFFKVQASDKDSGANDGQLYIKSELDRELQDRYVLMVVASDRAVEPLSATVNVTVILEDVNDNRPLFNSTNYTFYFEEEQRAGSFVGKVSAVDKDFGPNGEVRYSFEMVQPDFELHAISGEITNTHQFDRESLMRRRGTAVFSFTVIATDQGIPQPLKDQATVHVYMKDINDNAPKFLKDFYQATISESAANLTQVLRVSASDVDEGNNGLIHYSIIKGNEERQFAIDSTSGQVTLIGKLDYEATPAYSLVIQAVDSGTIPLNSTCTLNIDILDENDNTPSFLKSTLFVDVLENMRIGELVSSVTATDSDSGDNVDLYYSITGTNNHGTFSISPNTGSIFLAKKLDFETQSLYKLNITAKDQGRPPRSSTMSVVIHVRDFNDNPPSFPPGDIFKSIVENIPIGTSVISVTAHDPDADINGQLSYTIIQQMPRGNHFTIDEVKGTIYTNAEIDREFANLFELTVKANDQAVPIETRRYALKNVTILVTDLNDNVPMFISQNALAADPSAVIGSVLTTIMAADPDEGANGEIEYEIINGDTDTFIVDRYSGDLRVASALVPSQLIYNLIVSATDLGPERRKSTTELTIILQGLDGPVFTQPKYITILKEGEPIGTNVISIEAASPRGSEAPVEYYIVSVRCEEKTVGRLFTIGRHTGIIQTAAILDREQGACLYLVDVYAIEKSTAFPRTQRAEVETTLQDINDNPPVFPTDMLDLTVEENIGDGSKIMQLTAMDADEVQMLSSHTLSLVGSLVAAILATDDDSGVNGEITYIVNEDDEDGIFFLNPITGVFNLTRLLDYEVQQYYILTVRAEDGGGQFTTIRVYFNILDVNDNPPIFSLNSYSTSLMENLPVGSTVLVFNVTDADMMKAEIKMFFETSENKDTTYQNLWDTFKAVCRGKFIALNAHKRKQERSKIDTLTSQLKELEKQEQTHSKASRRQEITKIRAELKDIETQKTLQKINESRSWFFERINKIDRPLARLIKKKTEKNQIDAIKNDKGDITIDPTEIQTTIREYCKHLYANKLENLEEMDKFLDTYTLPRLNQEEVESLNRPITDSETVAIINSLPTKKSPGPDGFTAEFYQMITTPVFAQALYKVEINENTLTGTDIIQVFAADGDEGTNGQVRYGIVNGNTNQEFRIDSVTGAITVAKPLDREKTPTYHLTVQATDRGSTPRTDTSTVSIVLLDINDFVPVFELSPYSVNVPENLGTLPRTILQTASPCVRFASASKAYFTTIPEDAPTGTDVLLVNASDADASKNAVISYRIIGGNSQFTINPSTGQIITSALLDRETKDNYTLVVVCSDAGSPEPLSSSTSVLVTVTDVHDNPPRFQHHPYVTHIPSPTLPGSFVFAVTVTDADIGPNSELHYSLSGRNSEKFHIDPLRGAIMAAGPLNGASEVTFSVHVKDGGSFPKTDSTTVTVRFVNKADFPKVRAKEQTFMFPENQPVSSLVTTITGSSLRGEPMSYYIASGNLGNTFQIDQLTGQVSISQPLDFEKIQKYVVWIEARDGGFPPFSSYEKLDITVLDVNDNAPIFKEDPFISEILENLSPRKILTVSAMDKDSGPNGQLDYEIVNGNMENSFSINHATGEIRSVRPLDREKVSHYVLTIKSSDKGSPSQSTSVKVMINILDENDNAPRFSQIFSAHVPENSPLGYTVTRVTTSDEDIGINAISRYSIMDASLPFTINPSTGDIVISRPLNREDTDRYRIRVSAHDSGWTVSTDVTIFVTDINDNAPRFSRTSYYLDCPELTEIGSKVTQVFATDPDEGSNGQVFYFIKSQSEYFRINATTGEIFNKQILKYQNVTGFSNVNINRHSFIVTSSDRGKPSLISETTVTINIVDSNDNAPQFLKSKYFTPVTKNVKVGTKLIRVTAIDDKDFGLNSEVEYFISNDNHLGKFKLDNDTGWISVASSLISDLNQNFFITVTAKDKGNPPLSSQATVHITVTEENYHTPEFSQSHMSATIPESHSIGSIVRTVSARDRDAAMNGLIKYSISSGNEEGIFAINSSTGILTLAKALDYELCQKHEMTISAIDGGWVARTGYCSVTVNVIDVNDNSPVFLSDDYFPTVLENAPSGTTVIHLNATDADSGTNAVIAYTVQSSDSDLFVIDPNTGVITTQGFLDFETKQSYHLTVKAFNVPDEERCSFATVNIQLKGTNEYVPRFVSKLYYFEISEAAPKGTIVGEVFASDRDLGTDGEVHYLIFGNSRKKGFQINKKTGQIYVSGILDRKKEERVSLKVLAKNFGSIRGADIDEVTVNVTVLDANDPPIFTLNIYSVQISEGVPIGTHVTFVSAFDSDSIPSWSRFSYFIGSGNENGAFSINPQTGQITVTAELDRETLPIYNLSVLAVDSGTPSATGSASLLVTLEDINDNGPMLTVSEGEVMENKRPGTLVMTLQSTDPDLPPNQGPFTYYLLSTGPATSYFSLSTAGVLSTTREIDREQIADFYLSVVTKDSGVPQMSSTGTVHITVIDQNDNPSQSRTVEIFVNYYGNLFPGGILGSVKPQDPDVLDSFHCSLTSGVTSLFSIPGGTCDLNSQPRSTDGTFDLTVLSNDGVHSTVTSNIRVFFAGFSNATVDNSILLRLGVPTVKDFLTNHYLHFLRIASSQLTGLGTAVQLYSAYEENNRTFLLAAVKRNHNQYVNPSGVATFFESIKEILLRQSGVKVESVDHDSCVHGPCQNGGSCLRRLAVSSVLKSRESLPVIIVANEPLQPFLCKCLPGYAGSWCEIDIDECLPSPCHSGGTCHNLVGGFSCSCPDGFTGRACERDINECLQSPCKNGAICQNFPGSFNCVCKTGYTGMTTFVLFSLRLGKCVNLQSITVNATPALMVVPAKVVWILIIVIVHLVSLEHCELNSYGFEELSYMEFPSLDPNNNYIYVKFATIKSHALLLYNYDNQTGDRAEFLALEIAEERLRFSYNLGSGTYKLTTMKKVSDGHFHTVIARRAGMAASLTVDSCSENQEPGYCTVSNVAVSDDWTLDVQPNRVTVGGIRSLEPILQRRGHVESHDFVGCIMEFAVNGRPLEPSQALAAQGILDQYGDFISYCFKEKKCKKVCFTVTPDTALSLEGKGRLDYHMSQNEKREYLLRQSLRGAMLEPFGVNSLEVKFRTRSENGVLIHIQESSNYTTVKGMCESSVNYCECNPCFNGGSCQSGVDSYYCHCPFGVFGKHCELNSYGFEELSYMEFPSLDPNNNYIYVKFATIKSHALLLYNYDNQTGDRAEFLALEIAEERLRFSYNLGSGTYKLTTMKKVSDGHFHTVIARRAGMTLDVQPNRVTVGGIRSLEPILQRRGHVESHDFVGCIMEFAVNGRPLEPSQALAAQGILDQYGDFISYCFKEKKCKKYASLGLHLGKHSLASISKTDPSVKIGCRGPNICASNPCWGDLLCINQWYAYRCVPPGDCASHPCQNGGSCEPGLHSGFTCSCPDSHTGRTCEMVVACLGVLCPQGKVCKAGSPAGHVCVLSQGPEEISLPLWAVPAIVGSCATVLALLVLSLILCNQCRGKKAKNPKEEKKPKEKKKKGSENVAFDDPDNIPPYGDDMTVRKQPEGNPKPDIIERENPYLIYDETDIPHNSETIPSAPLASPEQEIEHYDIDNASSIAPSDADIIQHYKQFRSHTPKFSIQRHSPLGFARQSPMPLGASSLTYQPSYGQGLRTSSLSHSACPTPNPLSRHSPAPFSKSSTFYRNSPARELHLPIRDGNTLEMHGDTCQPGIFNYATRLGRRSKSPQAMASHGSRPGSRLKQPIGQIPLESSPPVGLSIEEVERLNTPRPRNPSICSADHGRSSSEEDCRRPLSRTRNPADGIPAPESSSDSDSHESFTCSEMEYDREKPMVYTSRMPKLSQVNESDADDEDNYGARLKPRRYHGRRAEGGPVGTQAAAPGTADNTLPMKLGQQAGTFNWDNLLNWGPGFGHYVDVFKDLASLPEKAAANEEGKAGTTKPVPKDGEAEQYV

SEQ ID NO: 1143 - DNA, 5432 bp, Homo sapiens
  CDS (187)..(3990)
ggtgccgagcactccggactctacgtgaacaacaacgggatcatctccttcctgaaggaggtttctcagttcaccccagtggccttccccattgccaaggaccgctgcgtggtggcagccttctgggcagatgtggacaaccggcgtgcaggcgacgtgtactaccgggaggccaccgacccagccatgctgcgccgagccacggaggacgtcaggcactacttccccgagctcctggacttcaatgccacctgggtttttgttgccacctggtaccgagtgaccttctttggaggcagttcctcatcccctgtcaacacattccagactgtgctcatcacagacggcaagctctccttcaccatcttcaactatgagtccatcgtgtggaccacaggcacacacgccagcagcgggggcaacgccactggcctcgggggcatcgcagcccaggctggcttcaacgcaggcgatgggcagcgttacttcagtatccccggctcgcgcacagcagacatggccgaggtggagaccaccaccaacgtgggtgtgcccgggcgctgggcgttcagaatcgatgatgcccaggtgcgcgtggggggctgcggccatacaacgtccgtgtgcctggccctgcgcccctgcctcaacggcggcaagtgcatcgacgactgcgtcacgggcaacccctcctacacctgctcctgcctctcgggcttcacggggcggaggtgccacctggacgtgaacgaatgtgcctcccagccctgtcagaatggtgggacctgtactcacggcatcaacagtttccgctgccagtgcccggctggctttgggggacccacctgtgagacagcccaatccccctgtgacaccaaagagtgtcaacatggtggccagtgccaggtggagaacggctctgcggtgtgtgtgtgccaggccggatacaccggagcagcctgcgagatggatgtggacgactgcagccctgacccctgcctgaatggaggctcttgtgttgacctagtggggaattacacctgcttgtgtgccgagcccttcaagggacttcgctgtgagacaggagaccatccagtgccagacgcctgcctctcggccccttgccacaatgggggcacctgtgtggatgcggaccagggctacgtgtgcgagtgccccgaaggcttcatgggcctggactgcagggagagagtccccgatgactgtgagtgccgcaacggaggcagatgcctgggcgccaacaccaccctctgccagtgccccctgggattctttgggcttctctgtgaatttgaaatcacagccatgccctgcaacatgaacacacagtgcccagatgggggctactgcatggagcacggcgggagctacctctgcgtctgccacaccgaccacaatgccagccactccctgccatcaccctgcgactcggacccctgcttcaacggaggctcctgcgatgcccatgacgactcctacacctgcgagtgcccgcgcgggttccacggcaagcactgcgagaaagcccggccacacctgtgcagctcagggccctgccggaacgggggcacgtgcaaggaggcgggcggcgagtaccactgcagctgcccctaccgcttcactgggaggcactgtgagatcgggaagccagactcgtgtgcctctggcccctgtcacaacggcggcacctgcttccactacattggcaaatacaagtgtgactgtcccccaggcttctccgggcggcactgcgagatagccccctccccctgcttccggagcccgtgtgtgaatgggggcacctgcgaggaccgggacacggatttcttctgccactgccaagcagggtacatgggacgccggtgccaggcagaggtggactgcggccccccggaggaggtgaagcacgccacactgcgcttcaacggcacgcggctgggcgcggtggccctgtatgcatgtgaccgtggctacagcctgagcgcccccagccgcatccgggtctgccagccacacggtgtctggagtgagcctccccagtgccttgaaatcgatgagtgccggtctcagccgtgcctgcatgggggctcttgtcaggaccgcgttgctgggtacctgtgcctctgcagcacaggctatgagggcgcccactgtgagctggagagggatgagtgccgagctcacccgtgcagaaatggagggtcctgcaggaacctcccaggggcctatgtctgccggtgccctgcaggcttcgttggagtccactgtgagacagaggtggacgcctgcgactccagcccctgccagcatggaggccggtgtgagagcggcggcggggcctacctgtgcgtctgcccagagagcttcttcggctaccactgcgagacagtgagtgacccctgcttctccagcccctgtgggggccgtggctattgcctggccagcaacggctcccacagctgcacctgcaaagtgggctacacgggcgaggactgcgccaaagagctcttcccaccgacggccctcaagatggagagagtggaggagagtggggtctctatctcctggaacccgcccaatggtccagccgccaggcagatgcttgatggctacgcggtcacctacgtctcctccgacggctcctaccgccgcacagactttgtggacaggacccgctcctcgcaccagctccaggccctggcggccggcagggcctacaacatctccgtcttctcagtgaagcgaaacagtaacaacaagaatgacatcagcaggcctgccgtgctgctggcccgcacgcgaccccgccctgtggaaggcttcgaggtcaccaatgtgacggctagcaccatctcagtgcagtgggccctgcacaggatccgccatgccaccgtcagtggggtccgtgtgtccatccgccaccctgaggccctcagggaccaggccaccgatgtggacaggagtgtggacaggttcacctttagggccctgctgcctgggaagaggtacaccatccagctgaccaccctcagtgggctcaggggagaggagcaccccacagagagcctggccaccgcgccgacgcacgtgtggacccggcccctgcctccagcaaacctgaccgccgcccgagtcactgccacctctgcccacgtggtctgggatgccccgactccaggcagcttgctggaggcttatgtcatcaatgtgaccaccagccagagcaccaagagccgctatgtccccaacgggaagctggcgtcctacacggtgcgcgacctgctgccgggacggcggtaccagccctctgtgatagcagtgcagagcacggagctcgggccgcagcagcaccagggaggacaccaccctcgggtgctcaagaacagaccgcccccggcgcgcctgccggagctgcgcctgctcaatgaccacagcgcccccgagacccccacccagccccccaggttctcggagtttgtggacggcagaggaagagtgagcgccaggttcggtggctcacccagcaaagcagccaccgtgagatcacaacccacagcctcggcgcagctcgagaacatggaggaagcccccaagcgggtcagcccggccctccagctccctgaacacggcagcaaggacatcggaaacgtccctggcaactgttcagaaaacccctgtcagaacggaggcacttgtgtgccgggcgcagacgcccacagctgtgactgcgggccagggttcaaaggcagacgctgcgagctcgcctgtataaaggtgtcccgcccctgcacaaggctgttctccgagacaaaggcctttccagtctgggagggaggcgtctgtcaccacgtgtataaaagagtctaccgagttcaccaagacatctgcttcaaagagagctgtgaaagcacaagcctcaagaagaccccaaacaggaaacaaagtaagagtcagacactggagaaatcttaaggatttaagacgttcttgttacactccaccaacctcacgagtttctaacacccaggaagatgaggtctaaaaactggatgaaaaaggacaccctgagaaaaggtcctagctggagtcagtcccctctgtgacctctctcctcaggcctctagaggacagatggccaggcctgtgcacacaccagcccaccctgagagacccctctgggaccaaccacctgtgagtcctgcgatgcgtttaagcagcctgtgccctcacccaagctgcagttcctgaaggtgtagtctgtgtctctgcggatgagatgacagctcgccattccccggaatcagtgaggctgtcagtcagccacgcttctgcagtatgcagaaacctgttcttagactccaaagccagagaaagaattctcccttcgaggcccaacaaattgagaaggaactgtgatggaccacttccaaaacagagacgggggcaggggctgaagggcagagaccaggtgatgtcagaaggaaagccgggttgcagacacagccgcccctgctctggtcctccagcgtgtttatgacgctcgtgcaggtcgacgagccatcctatggactagttaacactaaggtggagttcagacttttttagacaacggcgcgactggcagcctttctctatcaagggtcagacggtaaacgttttcagctttgcagaccagaggtccctgtggctacagtagcgcagacacagccacaggcatgtcattgaatggctgcggctatgttccaataaaaacttatttacaataacaggtggtggccaaattggcccatgggccttatttggtgaaccctgttctatgagatcacctaggcttcagccttaaacagtggaagccatcccctgaatgacaagtcacaagggtatcaaagaaagacccctgaattttcatggaaaaagctattcagacccctgcttggaaagctaaggcacactgccacgaagcagcaaggacgccttacaagtctcagtgcaacagagatggacacctgggctgggctggacaatgtttaaggttccttttagtccatgactcaagtgatactgttttaggctatcaggtagtaaacacgatcttagacatccccatctttgtaagcagaacagtacggcacttcaccacatctgcttcccaccatgcttctaagcagctgtcttccccctgctaatgttacaaccaaagcagccaccccacctcctctcgtgttgagcctcacgaccgctgacccagctggaaagccagcgccctgccgcgtcaccctgactctgctcagagccagcattccagccacaaagagggcctccttcctttcctctttcataaaaatgttttttgaagagttagagtatattttaggctttttatctttattaaaatttcatgtgcatgtgta

SEQ ID NO: 1144 - protein, 1268 aa, Homo sapiens
MLRRATEDVRHYFPELLDFNATWVFVATWYRVTFFGGSSSSPVNTFQTVLITDGKLSFTIFNYESIVWTTGTHASSGGNATGLGGIAAQAGFNAGDGQRYFSIPGSRTADMAEVETTTNVGVPGRWAFRIDDAQVRVGGCGHTTSVCLALRPCLNGGKCIDDCVTGNPSYTCSCLSGFTGRRCHLDVNECASQPCQNGGTCTHGINSFRCQCPAGFGGPTCETAQSPCDTKECQHGGQCQVENGSAVCVCQAGYTGAACEMDVDDCSPDPCLNGGSCVDLVGNYTCLCAEPFKGLRCETGDHPVPDACLSAPCHNGGTCVDADQGYVCECPEGFMGLDCRERVPDDCECRNGGRCLGANTTLCQCPLGFFGLLCEFEITAMPCNMNTQCPDGGYCMEHGGSYLCVCHTDHNASHSLPSPCDSDPCFNGGSCDAHDDSYTCECPRGFHGKHCEKARPHLCSSGPCRNGGTCKEAGGEYHCSCPYRFTGRHCEIGKPDSCASGPCHNGGTCFHYIGKYKCDCPPGFSGRHCEIAPSPCFRSPCVNGGTCEDRDTDFFCHCQAGYMGRRCQAEVDCGPPEEVKHATLRFNGTRLGAVALYACDRGYSLSAPSRIRVCQPHGVWSEPPQCLEIDECRSQPCLHGGSCQDRVAGYLCLCSTGYEGAHCELERDECRAHPCRNGGSCRNLPGAYVCRCPAGFVGVHCETEVDACDSSPCQHGGRCESGGGAYLCVCPESFFGYHCETVSDPCFSSPCGGRGYCLASNGSHSCTCKVGYTGEDCAKELFPPTALKMERVEESGVSISWNPPNGPAARQMLDGYAVTYVSSDGSYRRTDFVDRTRSSHQLQALAAGRAYNISVFSVKRNSNNKNDISRPAVLLARTRPRPVEGFEVTNVTASTISVQWALHRIRHATVSGVRVSIRHPEALRDQATDVDRSVDRFTFRALLPGKRYTIQLTTLSGLRGEEHPTESLATAPTHVWTRPLPPANLTAARVTATSAHVVWDAPTPGSLLEAYVINVTTSQSTKSRYVPNGKLASYTVRDLLPGRRYQPSVIAVQSTELGPQQHQGGHHPRVLKNRPPPARLPELRLLNDHSAPETPTQPPRFSEFVDGRGRVSARFGGSPSKAATVRSQPTASAQLENMEEAPKRVSPALQLPEHGSKDIGNVPGNCSENPCQNGGTCVPGADAHSCDCGPGFKGRRCELACIKVSRPCTRLFSETKAFPVWEGGVCHHVYKRVYRVHQDICFKESCESTSLKKTPNRKQSKSQTLEKS

SEQ ID NO: 1145 - DNA, 4401 bp, Homo sapiens
  CDS (187)..(4050)
  misc_feature (4315)..(4315): Wherein n may be a, c, g or t
ggtgccgagcactccggactctacgtgaacaacaacgggatcatctccttcctgaaggaggtttctcagttcaccccagtggccttccccattgccaaggaccgctgcgtggtggcagccttctgggcagatgtggacaaccggcgtgcaggcgacgtgtactaccgggaggccaccgacccagccatgctgcgccgagccacggaggacgtcaggcactacttccccgagctcctggacttcaatgccacctgggtttttgttgccacctggtaccgagtgaccttctttggaggcagttcctcatcccctgtcaacacattccagactgtgctcatcacagacggcaagctctccttcaccatcttcaactatgagtccatcgtgtggaccacaggcacacacgccagcagcgggggcaacgccactggcctcgggggcatcgcagcccaggctggcttcaacgcaggcgatgggcagcgttacttcagtatccccggctcgcgcacagcagacatggccgaggtggagaccaccaccaacgtgggtgtgcccgggcgctgggcgttcagaatcgatgatgcccaggtgcgcgtggggggctgcggccatacaacgtccgtgtgcctggccctgcgcccctgcctcaacggcggcaagtgcatcgacgactgcgtcacgggcaacccctcctacacctgctcctgcctctcgggcttcacggggcggaggtgccacctggacgtgaacgaatgtgcctcccagccctgtcagaatggtgggacctgtactcacggcatcaacagtttccgctgccagtgcccggctggctttgggggacccacctgtgagacagcccaatccccctgtgacaccaaagagtgtcaacatggtggccagtgccaggtggagaacggctctgcggtgtgtgtgtgccaggccggatacaccggagcagcctgcgagatggatgtggacgactgcagccctgacccctgcctgaatggaggctcttgtgttgacctagtggggaattacacctgcttgtgtgccgagcccttcaagggacttcgctgtgagacaggagaccatccagtgccagacgcctgcctctcggccccttgccacaatgggggcacctgtgtggatgcggaccagggctacgtgtgcgagtgccccgaaggcttcatgggcctggactgcagggagagagtccccgatgactgtgagtgccgcaacggaggcagatgcctgggcgccaacaccaccctctgccagtgccccctgggattctttgggcttctctgtgaatttgaaatcacagccatgccctgcaacatgaacacacagtgcccagatgggggctactgcatggagcacggcgggagctacctctgcgtctgccacaccgaccacaatgccagccactccctgccatcaccctgcgactcggacccctgcttcaacggaggctcctgcgatgcccatgacgactcctacacctgcgagtgcccgcgcgggttccacggcaagcactgcgagaaagcccggccacacctgtgcagctcagggccctgccggaacgggggcacgtgcaaggaggcgggcggcgagtaccactgcagctgcccctaccgcttcactgggaggcactgtgagatcgggaagccagactcgtgtgcctctggcccctgtcacaacggcggcacctgcttccactacattggcaaatacaagtgtgactgtcccccaggcttctccgggcggcactgcgagatagccccctccccctgcttccggagcccgtgtgtgaatgggggcacctgcgaggaccgggacacggatttcttctgccactgccaagcagggtacatgggacgccggtgccaggcagaggtggactgcggccccccggaggaggtgaagcacgccacactgcgcttcaacggcacgcggctgggcgcggtggccctgtatgcatgtgaccgtggctacagcctgagcgcccccagccgcatccgggtctgccagccacacggtgtctggagtgagcctccccagtgccttgaaatcgatgagtgccggtctcagccgtgcctgcatgggggctcttgtcaggaccgcgttgctgggtacctgtgcctctgcagcacaggctatgagggcgcccactgtgagctggagagggatgagtgccgagctcacccgtgcagaaatggagggtcctgcaggaacctcccaggggcctatgtctgccggtgccctgcaggcttcgttggagtccactgtgagacagaggtggacgcctgcgactccagcccctgccagcatggaggccggtgtgagagcggcggcggggcctacctgtgcgtctgcccagagagcttcttcggctaccactgcgagacagtgagtgacccctgcttctccagcccctgtgggggccgtggctattgcctggccagcaacggctcccacagctgcacctgcaaagtgggctacacgggcgaggactgcgccaaagagctcttcccaccgacggccctcaagatggagagagtggaggagagtggggtctctatctcctggaacccgcccaatggtccagccgccaggcagatgcttgatggctacgcggtcacctacgtctcctccgacggctcctaccgccgcacagactttgtggacaggacccgctcctcgcaccagctccaggccctggcggccggcagggcctacaacatctccgtcttctcagtgaagcgaaacagtaacaacaagaatgacatcagcaggcctgccgtgctgctggcccgcacgcgaccccgccctgtggaaggcttcgaggtcaccaatgtgacggctagcaccatctcagtgcagtgggccctgcacaggatccgccatgccaccgtcagtggggtccgtgtgtccatccgccaccctgaggccctcagggaccaggccaccgatgtggacaggagtgtggacaggttcacctttagggccctgctgcctgggaagaggtacaccatccagctgaccaccctcagtgggctcaggggagaggagcaccccacagagagcctggccaccgcgccgacgcacgtgtggacccggcccctgcctccagcaaacctgaccgccgcccgagtcactgccacctctgcccacgtggtctgggatgccccgactccaggcagcttgctggaggcttatgtcatcaatgtgaccaccagccagagcaccaagagccgctatgtccccaacgggaagctggcgtcctacacggtgcgcgacctgctgccgggacggcggtaccagccctctgtgatagcagtgcagagcacggagctcgggccgcagcacagcgagcccgcccacctctacatcatcacctcccccagggatggcgctgacagacgctggcaccagggaggacaccaccctcgggtgctcaagaacagaccgcccccggcgcgcctgccggagctgcgcctgctcaatgaccacagcgcccccgagacccccacccagccccccaggttctcggagtttgtggacggcagaggaagagtgagcgccaggttcggtggctcacccagcaaagcagccaccgtgagatcacaacccacagcctcggcgcagctcgagaacatggaggaagcccccaagcgggtcagcccggccctccagctccctgaacacggcagcaaggacatcggaaacgtccctggcaactgttcagaaaacccctgtcagaacggaggcacttgtgtgccgggcgcagacgcccacagctgtgactgcgggccagggttcaaaggcagacgctgcgagctcgcctgtataaaggtgtcccgcccctgcacaaggctgttctccgagacaaaggcctttccagtctgggagggaggcgtctgtcaccacgtgtataaaagagtctaccgagttcaccaagacatctgcttcaaagagagctgtgaaagcacaagcctcaagaagaccccaaacaggaaacaaagtaagagtcagacactggagaaatcttaagaaagaaggaacaggcaatgtagagaagctgtcaaatggtggactcccaaaccgttccaccactgcctcaaaaaacatcttgaccagcagaaggtggagctcaatgaagggtcaagagctcagcgaagggtaactaggtggaactgagagaaaccacgttcacaaactgcgtaatgcggacttcctgccgccctggagacccctcaactctctgtccatgtaaggcccttaaagagattcataggaactttgagcatccttnagatgtgaatattgttgggggcaggattgggggataaatagaagggaaggccactccacgagtatcccatgaacctggccagatct

SEQ ID NO: 1146 - protein, 1288 aa, Homo sapiens
MLRRATEDVRHYFPELLDFNATWVFVATWYRVTFFGGSSSSPVNTFQTVLITDGKLSFTIFNYESIVWTTGTHASSGGNATGLGGIAAQAGFNAGDGQRYFSIPGSRTADMAEVETTTNVGVPGRWAFRIDDAQVRVGGCGHTTSVCLALRPCLNGGKCIDDCVTGNPSYTCSCLSGFTGRRCHLDVNECASQPCQNGGTCTHGINSFRCQCPAGFGGPTCETAQSPCDTKECQHGGQCQVENGSAVCVCQAGYTGAACEMDVDDCSPDPCLNGGSCVDLVGNYTCLCAEPFKGLRCETGDHPVPDACLSAPCHNGGTCVDADQGYVCECPEGFMGLDCRERVPDDCECRNGGRCLGANTTLCQCPLGFFGLLCEFEITAMPCNMNTQCPDGGYCMEHGGSYLCVCHTDHNASHSLPSPCDSDPCFNGGSCDAHDDSYTCECPRGFHGKHCEKARPHLCSSGPCRNGGTCKEAGGEYHCSCPYRFTGRHCEIGKPDSCASGPCHNGGTCFHYIGKYKCDCPPGFSGRHCEIAPSPCFRSPCVNGGTCEDRDTDFFCHCQAGYMGRRCQAEVDCGPPEEVKHATLRFNGTRLGAVALYACDRGYSLSAPSRIRVCQPHGVWSEPPQCLEIDECRSQPCLHGGSCQDRVAGYLCLCSTGYEGAHCELERDECRAHPCRNGGSCRNLPGAYVCRCPAGFVGVHCETEVDACDSSPCQHGGRCESGGGAYLCVCPESFFGYHCETVSDPCFSSPCGGRGYCLASNGSHSCTCKVGYTGEDCAKELFPPTALKMERVEESGVSISWNPPNGPAARQMLDGYAVTYVSSDGSYRRTDFVDRTRSSHQLQALAAGRAYNISVFSVKRNSNNKNDISRPAVLLARTRPRPVEGFEVTNVTASTISVQWALHRIRHATVSGVRVSIRHPEALRDQATDVDRSVDRFTFRALLPGKRYTIQLTTLSGLRGEEHPTESLATAPTHVWTRPLPPANLTAARVTATSAHVVWDAPTPGSLLEAYVINVTTSQSTKSRYVPNGKLASYTVRDLLPGRRYQPSVIAVQSTELGPQHSEPAHLYIITSPRDGADRRWHQGGHHPRVLKNRPPPARLPELRLLNDHSAPETPTQPPRFSEFVDGRGRVSARFGGSPSKAATVRSQPTASAQLENMEEAPKRVSPALQLPEHGSKDIGNVPGNCSENPCQNGGTCVPGADAHSCDCGPGFKGRRCELACIKVSRPCTRLFSETKAFPVWEGGVCHHVYKRVYRVHQDICFKESCESTSLKKTPNRKQSKSQTLEKS

SEQ ID NO: 1147 - DNA, 4413 bp, Homo sapiens
  CDS (181)..(4404)
  misc_feature (1088)..(1088): Wherein n may be a, c, g or t
  misc_feature (1089)..(1089): Wherein n may be a, c, g or t
  misc_feature (4408)..(4408): Wherein n may be a, c, g or t
  misc_feature (4409)..(4409): Wherein n may be a, c, g or t
  misc_feature (4410)..(4410): Wherein n may be a, c, g or t
  misc_feature (4411)..(4411): Wherein n may be a, c, g or t
  misc_feature (4412)..(4412): Wherein n may be a, c, g or t
  misc_feature (4413)..(4413): Wherein n may be a, c, g or t
  misc_feature (1087)..(1089): Wherein Xaa may be Gln or His or Pro or Arg or Leu
gagcactccggactctacgtgaacaacaacgggatcatctccttcctgaaggaggtttctcagttcaccccagtggccttccccattgccaaggaccgctgcgtggtggcagccttctgggcagatgtggacaaccggcgtgcaggcgacgtgtactaccgggaggccaccgacccagccatgctgcgccgagccacggaggacgtcaggcactacttccccgagctcctggacttcaatgccacctgggtttttgttgccacctggtaccgagtgaccttctttggaggcagttcctcatcccctgtcaacacattccagactgtgctcatcacagacggcaagctctccttcaccatcttcaactatgagtccatcgtgtggaccacaggcacacacgccagcagcgggggcaacgccactggcctcgggggcatcgcagcccaggctggcttcaacgcaggcgatgggcagcgttacttcagtatccccggctcgcgcacagcagacatggccgaggtggagaccaccaccatcgtggttgtgcccgggcgctgggcgttcataatcgatgatgcccaggtgcgcgtggggggctgcggccatacaacgtccgtgtgcctggccctgcgcccctgcctcaacggcggcaagtgcatcgacgactgcgtcacgggcaacccctcctacacctgctcctgcctctcgggcttcacggggcggaggtgccacctggacgtgaacgaatgtgcctcccagccctgtcagaatggtgggacctgtactcacggcatcaacagtttccgctgccagtgcccggctggctttgggggacccacctgtgagacagcccaatccccctgtgacaccaaagagtgtcaacatggtggccagtgccaggtggagaatggctctgcggtgtgtgtgtgccaggccggatacaccggagcagcctgcgagatggatgtggacgactgcagccctgacccctgcctgaatggaggctcttgtgttgacctagtggggaattacacctgcttgtgtgccgagcccttcaagggacttcgctgtgagacaggagaccatcnncagtgccagacgcctgcctctcggccccttgccacaatgggggcacctgtgtggatgcggaccagggctacgtgtgcgagtgccccgaaggcttcatgggcctggactgcagggagagagtccccgatgactgtgagtgccgcaacggaggcagatgcctgggcgccaacaccaccctctgcccagtgccccctgggattctttgggcttctctgtgaatttgaaatcacagccatgccctgcaacatgaacacacagtgcccagatgggggctactgcatggagcacggcgggagctacctctgcgtctgccacaccgaccacaatgccagccactccctgccatcaccctgcgactcggacccctgcttcaacggaggctcctgcgatgcccatgacgactcctacacctgcgagtgcccgcgcgggttccacggcaagcactgcgagaaagcccggccacacctgtgcagctcagggccctgccggaacgggggcacgtgcaaggaggcgggcggcgagtaccactgcagctgcccctaccgcttcactgggaggcactgtgagatcgggaagccagactcgtgtgcctctggcccctgtcacaacggcggcacctgcttccactacattggcaaatacaagtgtgactgtcccccaggcttctccgggcggcactgcgagatagccccctccccctgcttccggagcccgtgtgtgaatgggggcacctgcgaggaccgggacacggatttcttctgccactgccaagcagggtacatgggacgccggtgccaggcagaggtggactgcggccccccggaggaggtgaagcacgccacactgcgcttcaacggcacgcggctgggcgcggtggccctgtatgcatgtgaccgtggctacagcctgagcgcccccagccgcatccgggtctgccagccacacggtgtctggaaaatcgatgagtgccggtctcagccgtgcctgcatgggggctcttgtcaggaccgcgttgctgggtacctgtgcctctgcagcacaggctatgagggcgcccactgtgagctggagagggatgagtgccgagctcacccgtgcagaaatggagggtcctgcaggaacctcccaggggcctatgtctgccggtgccctgcaggcttcgttggagtccactgtgagacagaggtggacgcctgcgactccagcccctgccagcatggaggccggtgtgagagcggcggcggggcctacctgtgcgtctgcccagagagcttcttcggctaccactgcgagacagtgagtgacccctgcttctccagcccctgtgggggccgtggctattgcctggccagcaacggctcccacagctgcacctgcaaagtgggctacacgggcgaggactgcgccaaagagctcttcccaccgacggccctcaagatggagagagtggaggagagtggggtctctatctcctggaacccgcccaatggtccagccgccaggcagatgcttgatggctacgcggtcacctacgtctcctccgacggctcctaccgccgcacagactttgtggacaggacccgctcctcgcaccagctccaggccctggcggccggcagggcctacaacatctccgtcttctcagtgaagcgaaacagtaacaacaagaatgacatcagcaggcctgccgtgctgctggcccgcacgcgaccccgccctgtggaaggcttcgaggtcaccaatgtgacggctagcaccatctcagtgcagtgggccctgcacaggatccgccatgccaccgtcagtggggtccgtgtgtccatccgccaccctgaggccctcagggaccaggccaccgatgtggacaggagtgtggacaggttcacctttagggccctgctgcctgggaagaggtacaccatccagctgaccaccctcagtgggctcaggggagaggagcaccccacagagagcctggccaccgcgccgacgcacgtgtggacccggcccctgcctccagcaaacctgaccgccgcccgagtcactgccacctctgcccacgtggtctgggatgccccgactccaggcagcttgctggaggcttatgtcatcaatgtgaccaccagccagagcaccaagagccgctatgtccccaacgggaagctggcgtcctacacggtgcgcgacctgctgccgggacggcggtaccagctctctgtgatagcagtgcagagcacggagctcgggccgcagcacagcgagcccgcccacctctacatcatcacctcccccagggatggcgctgacagacgctggcaccagggaggacaccaccctcgggtgctcaagaacagaccgcccccggcgcgcctgccggagctgcgcctgctcaatgaccacagcgcccccgagacccccacccagccccccaggttctcggagcttgtggacggcagaggaagagtgagcgccaggttcggtggctcacccagcaaagcagccaccgtgagatcacgtcctgtcccctacatgatgagcccacccccaccgccagcgcagtctccagccagtgacccccaccccgactgtgcacaaggcgcggggctcgtgggccgccggcagcatgcacctccatggcaggaggggcagctcggacatccgtgctccctgagatatagaagcactcaaaagggtggccccaggaccatcccgggtgcaaagcagctgcgccgtgtggtcaccgcctggcttctcctagaacccacagcctcggcgcagctcgagaacatggaggaagcccccaagcgggtcagcctggccctccagctccctgaacacggcagcaaggacatcggaagttatgcaggacctgaactgtctcctagtccggggctctgcctcgtgaggatcgaggccagcacgtccctgcagggcaccaagcatctgctgagcacctgcagcacacaagcaaaggagcagggtggagccttcacgctgccgtgcctgtgtggaccagtccagggtgaccacggggtaggtgagggaaagcctgtcttcacagaccactctccagctgacgtccctggcaactgttcagaaaacccctgtcagaacggaggcacttgtgtgccgggcgcagacgcccacagctgtgactgcgggccagggttcaaaggcagacgctgcgagctcggtataaaagagtctaccgagttcaccaagacatctgcttcaaagagagctgtgaaagcacaagcctcaagaagaccccaaacaggtgcctctggggagcaggcccatgccgtgtcctgcatgtagnnnnnn

SEQ ID NO: 1148 - protein, 1408 aa, Homo sapiens
  misc_feature (303)..(303): Wherein Xaa may be any naturally occurring amino acid
MLRRATEDVRHYFPELLDFNATWVFVATWYRVTFFGGSSSSPVNTFQTVLITDGKLSFTIFNYESIVWTTGTHASSGGNATGLGGIAAQAGFNAGDGQRYFSIPGSRTADMAEVETTTIVVVPGRWAFIIDDAQVRVGGCGHTTSVCLALRPCLNGGKCIDDCVTGNPSYTCSCLSGFTGRRCHLDVNECASQPCQNGGTCTHGINSFRCQCPAGFGGPTCETAQSPCDTKECQHGGQCQVENGSAVCVCQAGYTGAACEMDVDDCSPDPCLNGGSCVDLVGNYTCLCAEPFKGLRCETGDHXQCQTPASRPLATMGAPVWMRTRATCASAPKASWAWTAGRESPMTVSAATEADAWAPTPPSAQCPLGFFGLLCEFEITAMPCNMNTQCPDGGYCMEHGGSYLCVCHTDHNASHSLPSPCDSDPCFNGGSCDAHDDSYTCECPRGFHGKHCEKARPHLCSSGPCRNGGTCKEAGGEYHCSCPYRFTGRHCEIGKPDSCASGPCHNGGTCFHYIGKYKCDCPPGFSGRHCEIAPSPCFRSPCVNGGTCEDRDTDFFCHCQAGYMGRRCQAEVDCGPPEEVKHATLRFNGTRLGAVALYACDRGYSLSAPSRIRVCQPHGVWKIDECRSQPCLHGGSCQDRVAGYLCLCSTGYEGAHCELERDECRAHPCRNGGSCRNLPGAYVCRCPAGFVGVHCETEVDACDSSPCQHGGRCESGGGAYLCVCPESFFGYHCETVSDPCFSSPCGGRGYCLASNGSHSCTCKVGYTGEDCAKELFPPTALKMERVEESGVSISWNPPNGPAARQMLDGYAVTYVSSDGSYRRTDFVDRTRSSHQLQALAAGRAYNISVFSVKRNSNNKNDISRPAVLLARTRPRPVEGFEVTNVTASTISVQWALHRIRHATVSGVRVSIRHPEALRDQATDVDRSVDRFTFRALLPGKRYTIQLTTLSGLRGEEHPTESLATAPTHVWTRPLPPANLTAARVTATSAHVVWDAPTPGSLLEAYVINVTTSQSTKSRYVPNGKLASYTVRDLLPGRRYQLSVIAVQSTELGPQHSEPAHLYIITSPRDGADRRWHQGGHHPRVLKNRPPPARLPELRLLNDHSAPETPTQPPRFSELVDGRGRVSARFGGSPSKAATVRSRPVPYMMSPPPPPAQSPASDPHPDCAQGAGLVGRRQHAPPWQEGQLGHPCSLRYRSTQKGGPRTIPGAKQLRRVVTAWLLLEPTASAQLENMEEAPKRVSLALQLPEHGSKDIGSYAGPELSPSPGLCLVRIEASTSLQGTKHLLSTCSTQAKEQGGAFTLPCLCGPVQGDHGVGEGKPVFTDHSPADVPGNCSENPCQNGGTCVPGADAHSCDCGPGFKGRRCELGIKESTEFTKTSASKRAVKAQASRRPQTGASGEQAHAVSCM

SEQ ID NO: 1149 - DNA, 2877 bp, Homo sapiens
  CDS (6)..(2867)
gcttcatgggcctggactgcagggagagagtccccgatgactgtgagtgccgcaacggaggcagatgcctgggcgccaacaccaccctctgccagtgccccctgggattctttgggcttctctgtgaatttgaaatcacagccatgccctgcaacatgaacacacagtgcccagatgggggctactgcatggagcacggcgggagctacctctgcgtctgccacaccgaccacaatgccagccactccctgccatcaccctgcgactcggacccctgcttcaacggaggctcctgcgatgcccatgacgactcctacacctgcgagtgcccgcgcgggttccacggcaagcactgcgagaaagcccggccacacctgtgcagctcagggccctgccggaacgggggcacgtgcaaggaggcgggcggcgagtaccactgcagctgcccctaccgcttcactgggaggcactgtgagatcgggaagccagactcgtgtgcctctggcccctgtcacaacggcggcacctgcttccactacattggcaaatacaagtgtgactgtcccccaggcttctccgggcggcactgcgagatagccccctccccctgcttccggagcccgtgtgtgaatgggggcacctgcgaggaccgggacacggatttcttctgccactgccaagcagggtacatgggacgccggtgccaggcagaggtggactgcggccccccggaggaggtgaagcacgccacactgcgcttcaacggcacgcggctgggcgcggtggccctgtatgcatgtgaccgtggctacagcctgagcgcccccagccgcatccgggtctgccagccacacggtgtctggagtgagcctccccagtgccttgaaatcgatgagtgccggtctcagccgtgcctgcatgggggctcttgtcaggaccgcgttgctgggtacctgtgcctctgcagcacaggctatgagggcgcccactgtgagctggagagggatgagtgccgagctcacccgtgcagaaatggagggtcctgcaggaacctcccaggggcctatgtctgccggtgccctgcaggcttcgttggagtccactgtgagacagaggtggacgcctgcgactccagcccctgccagcatggaggccggtgtgagagcggcggcggggcctacctgtgcgtctgcccagagagcttcttcggctaccactgcgagacagtgagtgacccctgcttctccagcccctgtgggggccgtggctattgcctggccagcaacggctcccacagctgcacctgcaaagtgggctacacgggcgaggactgcgccaaagagctcttcccaccgacggccctcaagatggagagagtggaggagagtggggtctctatctcctggaacccgcccaatggtccagccgccaggcagatgcttgatggctacgcggtcacctacgtctcctccgacggctcctaccgccgcacagactttgtggacaggacccgctcctcgcaccagctccaggccctggcggccggcagggcctacaacatctccgtcttctcagtgaagcgaaacagtaacaacaagaatgacatcagcaggcctgccgtgctgctggcccgcacgcgaccccgccctgtggaaggcttcgaggtcaccaatgtgacggctagcaccatctcagtgcagtgggccctgcacaggatccgccatgccaccgtcagtggggtccgtgtgtccatccgccaccctgaggccctcagggaccaggccaccgatgtggacaggagtgtggacaggttcacctttagggccctgctgcctgggaagaggtacaccatccagctgaccaccctcagtgggctcaggggagaggagcaccccacagagagcctggccaccgcgccgacgcacgtgtggacccggcccctgcctccagcaaacctgaccgccgcccgagtcactgccacctctgcccacgtggtctgggatgccccgactccaggcagcttgctggaggcttatgtcatcaatgtgaccaccagccagagcaccaagagccgctatgtccccaacgggaagctggcgtcctacacggtgcgcgacctgctgccgggacggcggtaccagccctctgtgatagcagtgcagagcacggagctcgggccgcagcacagcgagcccgcccacctctacatcatcacctcccccagggatggcgctgacagacgctggcaccagggaggacaccaccctcgggtgctcaagaacagaccgcccccggcgcgcctgccggagctgcgcctgctcaatgaccacagcgcccccgagacccccacccagccccccaggttctcggagtttgtggacggcagaggaagagtgagcgccaggttcggtggctcacccagcaaagcagccaccgtgagatcacaacccacagcctcggcgcagctcgagaacatggaggaagcccccaagcgggtcagcccggccctccagctccctgaacacggcagcaaggacatcggaaacgtccctggcaactgttcagaaaacccctgtcagaacggaggcacttgtgtgccgggcgcagacgcccacagctgtgactgcgggccagggttcaaaggcagacgctgcgagctcgcctgtataaaggtgtcccgcccctgcacaaggctgttctccgagacaaaggcctttccagtctgggagggaggcgtctgtcaccacgtgtataaaagagtctaccgagttcaccaagacatctgcttcaaagagagctgtgaaagcacaagcctcaagaagaccccaaacaggaaacaaagtaagagtcagacactggagaaatcttaagaaagaa

SEQ ID NO: 1150 - protein, 954 aa, Homo sapiens
MGLDCRERVPDDCECRNGGRCLGANTTLCQCPLGFFGLLCEFEITAMPCNMNTQCPDGGYCMEHGGSYLCVCHTDHNASHSLPSPCDSDPCFNGGSCDAHDDSYTCECPRGFHGKHCEKARPHLCSSGPCRNGGTCKEAGGEYHCSCPYRFTGRHCEIGKPDSCASGPCHNGGTCFHYIGKYKCDCPPGFSGRHCEIAPSPCFRSPCVNGGTCEDRDTDFFCHCQAGYMGRRCQAEVDCGPPEEVKHATLRFNGTRLGAVALYACDRGYSLSAPSRIRVCQPHGVWSEPPQCLEIDECRSQPCLHGGSCQDRVAGYLCLCSTGYEGAHCELERDECRAHPCRNGGSCRNLPGAYVCRCPAGFVGVHCETEVDACDSSPCQHGGRCESGGGAYLCVCPESFFGYHCETVSDPCFSSPCGGRGYCLASNGSHSCTCKVGYTGEDCAKELFPPTALKMERVEESGVSISWNPPNGPAARQMLDGYAVTYVSSDGSYRRTDFVDRTRSSHQLQALAAGRAYNISVFSVKRNSNNKNDISRPAVLLARTRPRPVEGFEVTNVTASTISVQWALHRIRHATVSGVRVSIRHPEALRDQATDVDRSVDRFTFRALLPGKRYTIQLTTLSGLRGEEHPTESLATAPTHVWTRPLPPANLTAARVTATSAHVVWDAPTPGSLLEAYVINVTTSQSTKSRYVPNGKLASYTVRDLLPGRRYQPSVIAVQSTELGPQHSEPAHLYIITSPRDGADRRWHQGGHHPRVLKNRPPPARLPELRLLNDHSAPETPTQPPRFSEFVDGRGRVSARFGGSPSKAATVRSQPTASAQLENMEEAPKRVSPALQLPEHGSKDIGNVPGNCSENPCQNGGTCVPGADAHSCDCGPGFKGRRCELACIKVSRPCTRLFSETKAFPVWEGGVCHHVYKRVYRVHQDICFKESCESTSLKKTPNRKQSKSQTLEKS

SEQ ID NO: 1151 - DNA, 7459 bp, Homo sapiens
  CDS (182)..(4045)
gagcactccggactctacgtgaacaacaacgggatcatctccttcctgaaggaggtttctcagtttcaccccagtggccttccccattgccaaggaccgctgcgtggtggcagccttctgggcagatgtggacaaccggcgtgcaggcgacgtgtactaccgggaggccaccgacccagccatgctgcgccgagccacggaggacgtcaggcactacttccccgagctcctggacttcaatgccacctgggtttttgttgccacctggtaccgagtgaccttctttggaggcagttcctcatcccctgtcaacacattccagactgtgctcatcacagacggcaagctctccttcaccatcttcaactatgagtccatcgtgtggaccacaggcacacacgccagcagcgggggcaacgccactggcctcgggggcatcgcagcccaggctggcttcaacgcaggcgatgggcagcgttacttcagtatccccggctcgcgcacagcagacatggccgaggtggagaccaccaccaacgtgggtgtgcccgggcgctgggcgttcagaatcgatgatgcccaggtgcgcgtggggggctgcggccatacaacgtccgtgtgcctggccctgcgcccctgcctcaacggcggcaagtgcatcgacgactgcgtcacgggcaacccctcctacacctgctcctgcctctcgggcttcacggggcggaggtgccacctggacgtgaacgaatgtgcctcccagccctgtcagaatggtgggacctgtactcacggcatcaacagtttccgctgccagtgcccggctggctttgggggacccacctgtgagacagcccaatccccctgtgacaccaaagagtgtcaacatggtggccagtgccaggtggagaatggctctgcggtgtgtgtgtgccaggccggatacaccggagcagcctgcgagatggatgtggacgactgcagccctgacccctgcctgaatggaggctcttgtgttgacctagtggggaattacacctgcttgtgtgccgagcccttcaagggacttcgctgtgagacaggagaccatccagtgccagacgcctgcctctcggccccttgccacaatgggggcacctgtgtggatgcggaccagggctacgtgtgcgagtgccccgaaggcttcatgggcctggactgcagggagagagtccccgatgactgtgagtgccgcaacggaggcagatgcctgggcgccaacaccaccctctgccagtgccccctgggattctttgggcttctctgtgaatttgaaatcacagccatgccctgcaacatgaacacacagtgcccagatgggggctactgcatggagcacggcgggagctacctctgcgtctgccacaccgaccacaatgccagccactccctgccatcaccctgcgactcggacccctgcttcaacggaggctcctgcgatgcccatgacgactcctacacctgcgagtgcccgcgcgggttccacggcaagcactgcgagaaagcccggccacacctgtgcagctcagggccctgccggaacgggggcacgtgcaaggaggcgggcggcgagtaccactgcagctgcccctaccgcttcactgggaggcactgtgagatcgggaagccagactcgtgtgcctctggcccctgtcacaacggcggcacctgcttccactacattggcaaatacaagtgtgactgtcccccaggcttctccgggcggcactgcgagatagccccctccccctgcttccggagcccgtgtgtgaatgggggcacctgcgaggaccgggacacggatttcttctgccactgccaagcagggtacatgggacgccggtgccaggcagaggtggactgcggccccccggaggaggtgaagcacgccacactgcgcttcaacggcacgcggctgggcgcggtggccctgtatgcatgtgaccgtggctacagcctgagcgcccccagccgcatccgggtctgccagccacacggtgtctggagtgagcctccccagtgccttgaaatcgatgagtgccggtctcagccgtgcctgcatgggggctcttgtcaggaccgcgttgctgggtacctgtgcctctgcagcacaggctatgagggcgcccactgtgagctggagagggatgagtgccgagctcacccgtgcagaaatggagggtcctgcaggaacctcccaggggcctatgtctgccggtgccctgcaggcttcgttggagtccactgtgagacagaggtggacgcctgcgactccagcccctgccagcatggaggccggtgtgagagcggcggcggggcctacctgtgcgtctgcccagagagcttcttcggctaccactgcgagacagtgagtgacccctgcttctccagcccctgtgggggccgtggctattgcctggccagcaacggctcccacagctgcacctgcaaagtgggctacacgggcgaggactgcgccaaagagctcttcccaccgacggccctcaagatggagagagtggaggagagtggggtctctatctcctggaacccgcccaatggtccagccgccaggcagatgcttgatggctacgcggtcacctacgtctcctccgacggctcctaccgccgcacagactttgtggacaggacccgctcctcgcaccagctccaggccctggcggccggcagggcctacaacatctccgtcttctcagtgaagcgaaacagtaacaacaagaatgacatcagcaggcctgccgtgctgctggcccgcacgcgaccccgccctgtggaaggcttcgaggtcaccaatgtgacggctagcaccatctcagtgcagtgggccctgcacaggatccgccatgccaccgtcagtggggtccgtgtgtccatccgccaccctgaggccctcagggaccaggccaccgatgtggacaggagtgtggacaggttcacctttagggccctgctgcctgggaagaggtacaccatccagctgaccaccctcagtgggctcaggggagaggagcaccccacagagagcctggccaccgcgccgacgcacgtgtggacccggcccctgcctccagcaaacctgaccgccgcccgagtcactgccacctctgcccacgtggtctgggatgccccgactccaggcagcttgctggaggcttatgtcatcaatgtgaccaccagccagagcaccaagagccgctatgtccccaacgggaagctggcgtcctacacggtgcgcgacctgctgccgggacggcggtaccagccctctgtgatagcagtgcagagcacggagctcgggccgcagcacagcgagcccgcccacctctacatcatcacctcccccagggatggcgctgacagacgctggcaccagggaggacaccaccctcgggtgctcaagaacagaccgcccccggcgcgcctgccggagctgcgcctgctcaatgaccacagcgcccccgagacccccacccagccccccaggttctcggagtttgtggacggcagaggaagagtgagcgccaggttcggtggctcacccagcaaagcagccaccgtgagatcacaacccacagcctcggcgcagctcgagaacatggaggaagcccccaagcgggtcagcccggccctccagctccctgaacacggcagcaaggacgtcggaaacgtccctggcaactgttcagaaaacccctgtcagaacggaggcacttgtgtgccgggcgcagacgcccacagctgtggctgcgggccagggttcaaaggcagacgctgcgagctcgcctgtataaaggtgtcccgcccctgcacaaggctgttctccgagacaaaggcctttccagtctgggagggaggcgtctgtcaccacgtgtataaaagagtctaccgagttcaccaagacatctgcttcaaagagagctgtgaaagcacaagcctcaagaagaccccaaacaggaaacaaagtaagagtcagacactggagaaatcttaaggatttaagacgttcttgttacactccaccaacctcacgagtttctaacacccaggaagatgaggtctaaaaactggatgaaaaaggacaccctgagaaaaggtcctagctggagtcagtcccctctgtgacctctctcctcaggcctctagaggacagatggccaggcctgtgcacacaccagcccaccctgagagacccctctgggaccaaccacctgtgagtcctgcgatgcgtttaagcagcctgtgccctcacccaagctgcagttcctgaaggtgtagtctgtgtctctgcggatgagatgacagctcgccattccccggaatcagtgaggctgtcagtcagccacgcttctgcagtatgcagaaacctgttcttagactccaaagccagagaaagaattctcccttcgaggcccaacaaattgagaaggaactgtgatggaccacttccaaaacagagacgggggcaggggctgaagggcagagaccaggtgatgtcagaaggaaagccgggttgcagacacagccgcccctgctctggtcctccagcgtgtttatgacgctcgtgcaggtcgacgagccatcctatggactagttaacactaaggtggagttcagacttttttagacaacggcgcgactggcagcctttctctatcaagggtcagacggtaaacgttttcagctttgcagaccagaggtccctgtggctacagtagcgcagacacagccacaggcatgtcattgaatggctgcggctatgttccaataaaaacttatttacaataacaggtggtggccaaattggcccatgggccttatttggtgaaccctgttctatgagatcacctaggcttcagccttaaacagtggaagccatcccctgaatgacaagtcacaagggtatcaaagaaagacccctgaattttcatggaaaaagctattcagacccctgcttggaaagctaaggcacactgccacgaagcagcaaggacgccttacaagtctcagtgcaacagagatggacacctgggctgggctggacaatgtttaaggttccttttagtccatgactcaagtgatactgttttaggctatcaggtagtaaacacgatcttagacatccccatctttgtaagcagaacagtacggcacttcaccacatctgcttcccaccatgcttctaagcagctgtcttccccctgctaatgttacaaccaaagcagccaccccacctcctctcgtgttgagcctcacgaccgctgacccagctggaaagccagcgccctgccgcgtcaccctgactctgctcagagccagcattccagccacaaagagggcctccttcctttcctctttcataaaaatgttttttgaagagttagagtatattttaggctttttatctttattaaaatttcatgtgcatgtgtctgtgtattctgcaatttgtcattttcagaaagaaggaacaggcaattcgagaagtttcacctgtactcccgagctgttccccaggctccagacccacttgagagcagaaggtggagctcaatgaagggtctcgagctcagcgaagggtcactgggtgaactgagagaaaccacgttcacaaacgcgtactgcggacttcctgccgccctgggacctgtcactgtttgtccatgtaagctacagcattactagcagatgctaagatcgagtgatatcactggaaaagtaggtgaatcctactaggaaactttctactccctactaggacctcaagcccctcagccacacagcaaatgctaatatgctccagtgttagcttagaagccttgtgtcaacaagaactggctcctgagtcccaagcttggtgccacacagcaaatgctaatatgctccagtgttagcttagaagccttgtgtcaacaagaactggctcctgagtcccaagcttggtgccacacagcaaatgctaatatgctccagtgttagcttagaagccttgtgtcaacaagaactggctcctgagtcccaagtgctgtcacaggacttgcccattgggatgttttccacattaaatatcaagtaaaaagacttcctggtgctcaggaattacagttcgttcttgaaacattccaaagaggccaccacagcttttcccatgtggcttcttttaaaaactcaaatggcttccttgaaaatactcaaagtccacccaaggaaattagtaataatagaatcagaaaactgtcaggagcataaagatttctgtatcaaaatgaaagaagcaatcctgagttgctgaattacccatctgctaatgaaaccgggatggactgatcatctaaccaagtgcagactgaggattctacttagtcctccgactgggtacaacaacagcctaggttctagggagggtggcagtgaccgggatgccacaatggaagagaaaatgaaaacactggcacagtgaaatgtctcatttccaaacagttttgcctatggccaagcaaggcaataaagacaaactctcccttttccccattgcgtgtgggctgccaggtacaagtaagggaatctttgctgtgcccactgtcctccagtagagaacccaacaggcaagggccccactcaggtatcagctcacctcctgcacctccccttagcaggaactccttccactggcaaaggactgccactgccatctgactcaactgtggcgatgtggacggagtcaccgagctgcttttcttttgcaaaacaaaagtctttttctttgcagtcacgctgtaagacgaggctgctggagaaaacaaaagcacctagatttcagtgctgaatccccacaattgcatgcagctcacacctaccaggggtattccagtgcataggggaaaggaacccggctgaaaaaccagctccttatttttcttttaaataaaataatacgatcctaagtccatttaccatctgaagttgtcacgagtgaacagtcacattactgttgtggaccaggccttagatgagtttctcaggctcagcactgacattctgggccggatcatcctctcttgtgggaccatcctgtgcactgcaggatgtttcacagcacccctggcctctacccactagaatcctacaatctaccagatcctaggatctagttgatcctagaatgctaccaaggagacttgaattttggtcccatcatcaaaaatgccttctgcatcaatcctatgccagtttcccctaaaagagggctaactggaatgttctaggatgtaccaatcctccaggaccctcttagagctcatgccatcagagacaggcctctacctcagggatcaccccggctgacatcaaattcctcttctcttttcccaacatttcaaattgttcttcggactcattgagttcc

SEQ ID NO: 1152 - protein, 1288 aa, Homo sapiens
MLRRATEDVRHYFPELLDFNATWVFVATWYRVTFFGGSSSSPVNTFQTVLITDGKLSFTIFNYESIVWTTGTHASSGGNATGLGGIAAQAGFNAGDGQRYFSIPGSRTADMAEVETTTNVGVPGRWAFRIDDAQVRVGGCGHTTSVCLALRPCLNGGKCIDDCVTGNPSYTCSCLSGFTGRRCHLDVNECASQPCQNGGTCTHGINSFRCQCPAGFGGPTCETAQSPCDTKECQHGGQCQVENGSAVCVCQAGYTGAACEMDVDDCSPDPCLNGGSCVDLVGNYTCLCAEPFKGLRCETGDHPVPDACLSAPCHNGGTCVDADQGYVCECPEGFMGLDCRERVPDDCECRNGGRCLGANTTLCQCPLGFFGLLCEFEITAMPCNMNTQCPDGGYCMEHGGSYLCVCHTDHNASHSLPSPCDSDPCFNGGSCDAHDDSYTCECPRGFHGKHCEKARPHLCSSGPCRNGGTCKEAGGEYHCSCPYRFTGRHCEIGKPDSCASGPCHNGGTCFHYIGKYKCDCPPGFSGRHCEIAPSPCFRSPCVNGGTCEDRDTDFFCHCQAGYMGRRCQAEVDCGPPEEVKHATLRFNGTRLGAVALYACDRGYSLSAPSRIRVCQPHGVWSEPPQCLEIDECRSQPCLHGGSCQDRVAGYLCLCSTGYEGAHCELERDECRAHPCRNGGSCRNLPGAYVCRCPAGFVGVHCETEVDACDSSPCQHGGRCESGGGAYLCVCPESFFGYHCETVSDPCFSSPCGGRGYCLASNGSHSCTCKVGYTGEDCAKELFPPTALKMERVEESGVSISWNPPNGPAARQMLDGYAVTYVSSDGSYRRTDFVDRTRSSHQLQALAAGRAYNISVFSVKRNSNNKNDISRPAVLLARTRPRPVEGFEVTNVTASTISVQWALHRIRHATVSGVRVSIRHPEALRDQATDVDRSVDRFTFRALLPGKRYTIQLTTLSGLRGEEHPTESLATAPTHVWTRPLPPANLTAARVTATSAHVVWDAPTPGSLLEAYVINVTTSQSTKSRYVPNGKLASYTVRDLLPGRRYQPSVIAVQSTELGPQHSEPAHLYIITSPRDGADRRWHQGGHHPRVLKNRPPPARLPELRLLNDHSAPETPTQPPRFSEFVDGRGRVSARFGGSPSKAATVRSQPTASAQLENMEEAPKRVSPALQLPEHGSKDVGNVPGNCSENPCQNGGTCVPGADAHSCGCGPGFKGRRCELACIKVSRPCTRLFSETKAFPVWEGGVCHHVYKRVYRVHQDICFKESCESTSLKKTPNRKQSKSQTLEKS

SEQ ID NO: 1153 - DNA, 5432 bp, Homo sapiens
  CDS (187)..(3990)
ggtgccgagcactccggactctacgtgaacaacaacgggatcatctccttcctgaaggaggtttctcagttcaccccagtggccttccccattgccaaggaccgctgcgtggtggcagccttctgggcagatgtggacaaccggcgtgcaggcgacgtgtactaccgggaggccaccgacccagccatgctgcgccgagccacggaggacgtcaggcactacttccccgagctcctggacttcaatgccacctgggtttttgttgccacctggtaccgagtgaccttctttggaggcagttcctcatcccctgtcaacacattccagactgtgctcatcacagacggcaagctctccttcaccatcttcaactatgagtccatcgtgtggaccacaggcacacacgccagcagcgggggcaacgccactggcctcgggggcatcgcagcccaggctggcttcaacgcaggcgatgggcagcgttacttcagtatccccggctcgcgcacagcagacatggccgaggtggagaccaccaccaacgtgggtgtgcccgggcgctgggcgttcagaatcgatgatgcccaggtgcgcgtggggggctgcggccatacaacgtccgtgtgcctggccctgcgcccctgcctcaacggcggcaagtgcatcgacgactgcgtcacgggcaacccctcctacacctgctcctgcctctcgggcttcacggggcggaggtgccacctggacgtgaacgaatgtgcctcccagccctgtcagaatggtgggacctgtactcacggcatcaacagtttccgctgccagtgcccggctggctttgggggacccacctgtgagacagcccaatccccctgtgacaccaaagagtgtcaacatggtggccagtgccaggtggagaacggctctgcggtgtgtgtgtgccaggccggatacaccggagcagcctgcgagatggatgtggacgactgcagccctgacccctgcctgaatggaggctcttgtgttgacctagtggggaattacacctgcttgtgtgccgagcccttcaagggacttcgctgtgagacaggagaccatccagtgccagacgcctgcctctcggccccttgccacaatgggggcacctgtgtggatgcggaccagggctacgtgtgcgagtgccccgaaggcttcatgggcctggactgcagggagagagtccccgatgactgtgagtgccgcaacggaggcagatgcctgggcgccaacaccaccctctgccagtgccccctgggattctttgggcttctctgtgaatttgaaatcacagccatgccctgcaacatgaacacacagtgcccagatgggggctactgcatggagcacggcgggagctacctctgcgtctgccacaccgaccacaatgccagccactccctgccatcaccctgcgactcggacccctgcttcaacggaggctcctgcgatgcccatgacgactcctacacctgcgagtgcccgcgcgggttccacggcaagcactgcgagaaagcccggccacacctgtgcagctcagggccctgccggaacgggggcacgtgcaaggaggcgggcggcgagtaccactgcagctgcccctaccgcttcactgggaggcactgtgagatcgggaagccagactcgtgtgcctctggcccctgtcacaacggcggcacctgcttccactacattggcaaatacaagtgtgactgtcccccaggcttctccgggcggcactgcgagatagccccctccccctgcttccggagcccgtgtgtgaatgggggcacctgcgaggaccgggacacggatttcttctgccactgccaagcagggtacatgggacgccggtgccaggcagaggtggactgcggccccccggaggaggtgaagcacgccacactgcgcttcaacggcacgcggctgggcgcggtggccctgtatgcatgtgaccgtggctacagcctgagcgcccccagccgcatccgggtctgccagccacacggtgtctggagtgagcctccccagtgccttgaaatcgatgagtgccggtctcagccgtgcctgcatgggggctcttgtcaggaccgcgttgctgggtacctgtgcctctgcagcacaggctatgagggcgcccactgtgagctggagagggatgagtgccgagctcacccgtgcagaaatggagggtcctgcaggaacctcccaggggcctatgtctgccggtgccctgcaggcttcgttggagtccactgtgagacagaggtggacgcctgcgactccagcccctgccagcatggaggccggtgtgagagcggcggcggggcctacctgtgcgtctgcccagagagcttcttcggctaccactgcgagacagtgagtgacccctgcttctccagcccctgtgggggccgtggctattgcctggccagcaacggctcccacagctgcacctgcaaagtgggctacacgggcgaggactgcgccaaagagctcttcccaccgacggccctcaagatggagagagtggaggagagtggggtctctatctcctggaacccgcccaatggtccagccgccaggcagatgcttgatggctacgcggtcacctacgtctcctccgacggctcctaccgccgcacagactttgtggacaggacccgctcctcgcaccagctccaggccctggcggccggcagggcctacaacatctccgtcttctcagtgaagcgaaacagtaacaacaagaatgacatcagcaggcctgccgtgctgctggcccgcacgcgaccccgccctgtggaaggcttcgaggtcaccaatgtgacggctagcaccatctcagtgcagtgggccctgcacaggatccgccatgccaccgtcagtggggtccgtgtgtccatccgccaccctgaggccctcagggaccaggccaccgatgtggacaggagtgtggacaggttcacctttagggccctgctgcctgggaagaggtacaccatccagctgaccaccctcagtgggctcaggggagaggagcaccccacagagagcctggccaccgcgccgacgcacgtgtggacccggcccctgcctccagcaaacctgaccgccgcccgagtcactgccacctctgcccacgtggtctgggatgccccgactccaggcagcttgctggaggcttatgtcatcaatgtgaccaccagccagagcaccaagagccgctatgtccccaacgggaagctggcgtcctacacggtgcgcgacctgctgccgggacggcggtaccagccctctgtgatagcagtgcagagcacggagctcgggccgcagcagcaccagggaggacaccaccctcgggtgctcaagaacagaccgcccccggcgcgcctgccggagctgcgcctgctcaatgaccacagcgcccccgagacccccacccagccccccaggttctcggagtttgtggacggcagaggaagagtgagcgccaggttcggtggctcacccagcaaagcagccaccgtgagatcacaacccacagcctcggcgcagctcgagaacatggaggaagcccccaagcgggtcagcccggccctccagctccctgaacacggcagcaaggacatcggaaacgtccctggcaactgttcagaaaacccctgtcagaacggaggcacttgtgtgccgggcgcagacgcccacagctgtgactgcgggccagggttcaaaggcagacgctgcgagctcgcctgtataaaggtgtcccgcccctgcacaaggctgttctccgagacaaaggcctttccagtctgggagggaggcgtctgtcaccacgtgtataaaagagtctaccgagttcaccaagacatctgcttcaaagagagctgtgaaagcacaagcctcaagaagaccccaaacaggaaacaaagtaagagtcagacactggagaaatcttaaggatttaagacgttcttgttacactccaccaacctcacgagtttctaacacccaggaagatgaggtctaaaaactggatgaaaaaggacaccctgagaaaaggtcctagctggagtcagtcccctctgtgacctctctcctcaggcctctagaggacagatggccaggcctgtgcacacaccagcccaccctgagagacccctctgggaccaaccacctgtgagtcctgtgatgcgtttaagcagcctgtgccctcacccaagctgcagttcctgaaggtgtagtctgtgtctctgcggatgagatgacagctcgccattccccggaatcagtgaggctgtcagtcagccacgcttctgcagtatgcagaaacctgttcttagactccaaagccagagaaagaattctcccttcgaggcccaacaaattgagaaggaactgtgatggaccacttccaaaacagagacgggggcaggggctgaagggcagagaccaggtgatgtcagaaggaaagccgggttgcagacacagccgcccctgctctggtcctccagcgtgtttatgacgctcgtgcaggtcgacgagccatcctatggactagttaacactaaggtggagttcagacttttttagacaacggcgcgactggcagcctttctctatcaagggtcagacggtaaacgttttcagctttgcagaccagaggtccctgtggctacagtagcgcagacacagccacaggcatgtcattgaatggctgcggctatgttccaataaaaacttatttacaataacaggtggtggccaaattggcccatgggccttatttggtgaaccctgttctatgagatcacctaggcttcagccttaaacagtggaagccatcccctgaatgacaagtcacaagggtatcaaagaaagacccctgaattttcatggaaaaagctattcagacccctgcttggaaagctaaggcacactgccacgaagcagcaaggacgccttacaagtctcagtgcaacagagatggacacctgggctgggctggacaatgtttaaggttccttttagtccatgactcaagtgatactgttttaggctatcaggtagtaaacacgatcttagacatccccatctttgtaagcagaacagtacggcacttcaccacatctgcttcccaccatgcttctaagcagctgtcttccccctgctaatgttacaaccaaagcagccaccccacctcctctcgtgttgagcctcacgaccgctgacccagctggaaagccagcgccctgccgcgtcaccctgactctgctcagagccagcattccagccacaaagagggcctccttcctttcctctttcataaaaatgttttttgaagagttagagtatattttaggctttttatctttattaaaatttcatgtgcatgtgta

SEQ ID NO: 1154 - protein, 1268 aa, Homo sapiens; identical to SEQ ID NO: 1144

SEQ ID NO: 1155 - DNA, 2018 bp, Homo sapiens
  CDS (101)..(1936)
ctccccacggcgccaggaggaggggcgagggccggcagccccctctcccgcgcgcggcgcaggagccgagcccagcccgggggacccgccgccgccggtcatgtgggccggactgctccttcgggccgcctgtgtcgcgctcctgctgccgggggcaccagcccgaggctacaccgggaggaagccgcccgggcacttcgcggccgagaggcgccgactgggcccccacgtctgcctctctgggtttgggagtggctgctgccctggctgggcgccctctatgggtggtgggcactgcaccctgcgtctctgctccttcggctgtgggagtggcatctgcatcgctcccaatgtctgctcctgccaggatggagagcaaggggccacctgcccagaaacccatggaccatgtggggagtacggctgtgaccttacctgcaaccatggaggctgtcaggaggtggcccgagtgtgccccgtgggcttctcgatgacggagacagctgttggcatcaggtgtgacattgacgaatgtgtaacctcctcctgcgagggccactgtgtgaacacagaaggtgggtttgtgtgcgagtgtgggccgggcatgcagctgtctgccgaccgccacagctgccaagacactgacgaatgcctagggactccctgtcagcagagatgtaaaaacagcattggcagctacaagtgttcctgtcgaactggcttccaccttcatggcaaccggcactcctgtgtagatgtaaacgagtgtcggaggccattggagaggcgagtctgtcaccattcctgccacaacaccgtgggcagcttcctatgcacatgccgacctggcttcaggctccgagctgaccgcgtgtcctgtgaagctttcccgaaagccgtgctggccccatctgccatcctgcaaccccggcaacacccgtccaagatgcttctgttgcttcctgaggccggccggcctgccctgtccccaggacatagccctccttctggggctccagggcccccagccggagtcaggaccacccgcctgccatctcccaccccacgactacccacatcctccccttctgcccctgtgtggctgctgtccaccctgctggccaccccagtgcctactgcctccctgctggggaacctcagacccccctcactccttcagggggaggtgatggggaccccttcctcacccaggggccctgagtccccccgactggcagcagggccctctccctgctggcacctgggagccatgcatgaatcaaggagtcgctggacagagcctgggtgttcccagtgctggtgcgaggatgggaaggtgacctgtgaaaaggtgaggtgtgaagctgcttgttcccacccaattccctccagagatggtgggtgctgcccatcgtgcacaggttgttttcacagtggtgtcgtccgagctgaaggggatgtgttttcacctcccaatgagaactgcaccgtctgtgtctgtctggctggaaacgtgtcgtgcatgtttcgtgagtgtccttttggcccgtgtgagaccccccataaagacagatgctatttccacggccggtggtacgcagacggggctgtgttcagtgggggtggtgacgagtgtaccacctgtgtttgccagaatggggaggtggagtgctccttcatgccctgccctgagctggcctgcccccgagaagagtggcggctgggccctgggcagtgttgcttcacctgccaggagcccacaccctcgacaggttgctctcttgacgacaacggggttgagtttccgattggacagatctggtcgcctggtgacccctgtagatggctcggtgagctgcaagaggacagactgtgtggactcctgccctcacccgatccggatccctggacagtgctgcccagactgttcagcaggtaatcccctgcctctgccccaagcccccagggcagggcatctcaggcatcgggctccttaagccctatacagccttcatctc

SEQ ID NO: 1156 - protein, 612 aa, Homo sapiens
MWAGLLLRAACVALLLPGAPARGYTGRKPPGHFAAERRRLGPHVCLSGFGSGCCPGWAPSMGGGHCTLRLCSFGCGSGICIAPNVCSCQDGEQGATCPETHGPCGEYGCDLTCNHGGCQEVARVCPVGFSMTETAVGIRCDIDECVTSSCEGHCVNTEGGFVCECGPGMQLSADRHSCQDTDECLGTPCQQRCKNSIGSYKCSCRTGFHLHGNRHSCVDVNECRRPLERRVCHHSCHNTVGSFLCTCRPGFRLRADRVSCEAFPKAVLAPSAILQPRQHPSKMLLLLPEAGRPALSPGHSPPSGAPGPPAGVRTTRLPSPTPRLPTSSPSAPVWLLSTLLATPVPTASLLGNLRPPSLLQGEVMGTPSSPRGPESPRLAAGPSPCWHLGAMHESRSRWTEPGCSQCWCEDGKVTCEKVRCEAACSHPIPSRDGGCCPSCTGCFHSGVVRAEGDVFSPPNENCTVCVCLAGNVSCMFRECPFGPCETPHKDRCYFHGRWYADGAVFSGGGDECTTCVCQNGEVECSFMPCPELACPREEWRLGPGQCCFTCQEPTPSTGCSLDDNGVEFPIGQIWSPGDPCRWLGELQEDRLCGLLPSPDPDPWTVLPRLFSR

SEQ ID NO: 1157 - DNA, 2819 bp, Homo sapiens
  CDS (5)..(2806)
ggtcatgtgggccggactgctccttcgggccgcctgtgtcgcgctcctgctgccgggggcaccagcccgaggctacaccgggaggaagccgcccgggcacttcgcggccgagagacgccgactgggcccccacgtctgcctctctgggtttgggagtggctgctgccctggctgggcgccctctatgggtggtgggcactgcaccctgcccctctgctccctcggctgtgggagtggcatctgcatcgctcccaatgtctgctcctgccaggatggagagcaaggggccacctgcccagaaacccatggaccatgtggggagtacggctgtgaccttacctgcaaccatggaggctgtcaggaggtggcccgagtgtgccccgtgggcttctcgatgacggagacagctgttggcatcaggtgtacagacattgacgaatgtgtaacctcctcctgcgagggccactgtgtgaacacagaagacactgacgaatgcctagggactccctgtcagcagagatgtaaaaacagcattggcagctacaagtgttcctgtcgaactggcttccaccttcatggcaaccggcactcctgtgtagatgtaaacgagtgtcggaggccattggagaggcgagtctgtcaccattcctgccacaacaccgtgggcagcttcctatgcacatgccgacctggcttcaggctccgagctgaccgcgtgtcctgtgaagctttcccgaaagccgtgctggccccatctgccatcctgcaaccccggcaacacccgtccaagatgcttctgttgcttcctgaggccggccggcctgccctgtccccaggacatagccctccttctggggctccagggcccccagccggagtcaggaccacccgcctgccatctcccaccccacgactacccacatcctccccttctgcccctgtgtggctgctgtccaccctgctggccaccccagtgcctactgcctccctgctggggaacctcagacccccctcactccttcagggggaggtgatggggaccccttcctcacccaggggccctgagtccccccgactggcagcagggccctctccctgctggcacctgggagccatgcatgaatcaaggagtcgctggacagagcctgggtgttcccagtgctggtgcgaggacgggaaggtgacctgtgaaaaggtgaggtgtgaagctgcttgttcccacccaattccctccagagatggtgggtgctgcccatcgtgcacaggctgttttcacagtggtgtcgtccgagctgaaggggatgtgttttcacctcccaatgagaactgcaccgtctgtgtctgtctggctggaaacgtgtcctgcatctctcctgagtgtccttctggcccctgtcagacccccccacagacggattgctgtacttgtgttccagtgagatgctatttccacggccggtggtacgcagacggggctgtgttcagtgggggtggtgacgagtgtaccacctgtgtttgccagaatggggaggtggagtgctccttcatgccctgccctgagctggcctgcccccgagaagagtggcggctgggccctgggcagtgttgcttcacctgccaggagcccacaccctcgacaggctgctctcttgacgacaacggggttgagtttccgattggacagatctggtcgcctggtgacccctgtgagttatgcatctgccaggcagatggctcggtgagctgcaagaggacagactgtgtggactcctgccctcacccgatccggatccctggacagtgctgcccagactgttcagcaggctgcacctacacaggcagaatcttctataacaacgagaccttcccgtctgtgctggacccatgtctgagctgcatctgcctgctgggctcagtggcctgttcccccgtggactgccccatcacctgtacctaccctttccaccctgacggggagtgctgccccgtgtgccgagactgcaactacgagggaaggaaggtggcgaatggccaggtgttcaccttggatgatgaaccctgcacccggtgcacgtgccagctgggagaggtgagctgtgagaaggttccctgccagcgggcctgtgccgaccctgccctgcttcctggggactgctgctcttcctgtccagattccctgtctcctctggaagaaaagcaggggctctcccctcacggaaatgtggcattcagcaaagctggtcggagcctgcatggagacactgaggcccctgtcaactgtagctcctgtcctgggcccccgacagcatcaccctcgaggccggtgcttcatctcctccagctccttttaagaacgaacttgatgaaaacacagactttacctacaagcccggcaggagctcatggtccacactcactcgctttggggctgacagccactttcccaggggagcctggggcctcccctcgactctcaccagggccttcgacccctccaggagcccccactctacctctagcttccccaggggctcctcagccacctcctgtgactccagagcgctcgttctcagcctctggggcccagatagtgtccaggtggcctcctctgcctggcaccctcctgacggaagcttcagcactttccatgatggaccccagcccctcgaagacccccatcaccctcctcgggcctcgcgtgctttctcccaccacctctagactctccacagcccttgcagccaccacccaccctggcccccagcagcccccagtgggggcttctcggggggaagagtccaccatgtaaggaggtcact

SEQ ID NO: 1158 - protein, 934 aa, Homo sapiens
MWAGLLLRAACVALLLPGAPARGYTGRKPPGHFAAERRRLGPHVCLSGFGSGCCPGWAPSMGGGHCTLPLCSLGCGSGICIAPNVCSCQDGEQGATCPETHGPCGEYGCDLTCNHGGCQEVARVCPVGFSMTETAVGIRCTDIDECVTSSCEGHCVNTEDTDECLGTPCQQRCKNSIGSYKCSCRTGFHLHGNRHSCVDVNECRRPLERRVCHHSCHNTVGSFLCTCRPGFRLRADRVSCEAFPKAVLAPSAILQPRQHPSKMLLLLPEAGRPALSPGHSPPSGAPGPPAGVRTTRLPSPTPRLPTSSPSAPVWLLSTLLATPVPTASLLGNLRPPSLLQGEVMGTPSSPRGPESPRLAAGPSPCWHLGAMHESRSRWTEPGCSQCWCEDGKVTCEKVRCEAACSHPIPSRDGGCCPSCTGCFHSGVVRAEGDVFSPPNENCTVCVCLAGNVSCISPECPSGPCQTPPQTDCCTCVPVRCYFHGRWYADGAVFSGGGDECTTCVCQNGEVECSFMPCPELACPREEWRLGPGQCCFTCQEPTPSTGCSLDDNGVEFPIGQIWSPGDPCELCICQADGSVSCKRTDCVDSCPHPIRIPGQCCPDCSAGCTYTGRIFYNNETFPSVLDPCLSCICLLGSVACSPVDCPITCTYPFHPDGECCPVCRDCNYEGRKVANGQVFTLDDEPCTRCTCQLGEVSCEKVPCQRACADPALLPGDCCSSCPDSLSPLEEKQGLSPHGNVAFSKAGRSLHGDTEAPVNCSSCPGPPTASPSRPVLHLLQLLLRTNLMKTQTLPTSPAGAHGPHSLALGLTATFPGEPGASPRLSPGPSTPPGAPTLPLASPGAPQPPPVTPERSFSASGAQIVSRWPPLPGTLLTEASALSMMDPSPSKTPITLLGPRVLSPTTSRLSTALAATTHPGPQQPPVGASRGEESTM

SEQ ID NO: 1159 - DNA, 1814 bp, Homo sapiens
  CDS (1)..(1812)
ggtacccgaggctacaccgggaggaagccgcccgggcacttcgcggccgagagacgccgactgggcccccacgtctgcctctctgggtttgggagtggctgctgccctggctgggcgccctctatgggtggtgggcactgcaccctgcccccctgctccttcggctgtgggagtggcatctgcatcgctcccaatgtctgctcctgccaggatggagagcaaggggccacctgcccagaaacccatggaccatgtggggagtacggctgtgaccttacctgcaaccatggaggctgtcaggaggtggcccgagtgtgccccgtgggcttctcgatgacggagacagctgttggcatcaggtgtacagacattgacgaatgtgtaacctcctcctgcgagggccactgtgtgaacacagaaagtgggtttgtgtgcgagtgtgggccgggcatgcagctgtctgccgaccgccacagctgccaagacactgacgaatgcctagggactccctgtcagcagagatgtaaaaacagcattggcagctacaagtgttcctgtcgaactggcttccaccttcatggcaaccggcactcctgtgtagatgtaaacgagtgtcggaggccattggagaggcgagtctgtcaccattcctgccacaacaccgtgggcagcttcctatgcacatgccgacctggcttcaggctccgagctgaccgcgtgtcctgtgaagctttcccgaaagccgtgctggccccatctgccatcctgcaaccccggcaacacccgtccaagatgcttctgttgcttcctgaggccggccggcctgccctgtccccaggacatagccctccttctggggctccagggcccccagccggagtcaggaccacccgcctgccatctcccaccccacgactacccacatcctccccttctgcccctgtgtggctgctgtccaccctgctggccaccccagtgcctactgcctccctgctggggaacctcagacccccctcactccttcagggggaggtgatggggaccccttcctcacccaggggccctgagtccccccgactggcagcagggccctctccctgctggcacctgggagccatgtatgaatcaaggagtcgctggacagagcctgggtgttcccagtgttggtgcgaggacgggaaggtgacctgtgaaaaggtgaggtgtgaagctgcttgttcccacccaattccctccagagatggtgggtgctgcccatcgtgcacaggctgttttcacagtggtgtcgtccgagctgaaggggatgtgttttcacctcccaatgagaactgcaccgtctgtgtctgtctggctggaaacgtgtcctgcatctctcctgagtgtccttctggcccctgtcagacccccccacagacggattgctgtacttgtgttccagtgagatgctatttccacggccggtggtacgcagacggggctgtgttcagtgggggtggtgacgagtgtaccacctgtgtttgccagaatggggaggtggagtgctccttcatgccctgccctgagctggcctgcccccgagaagagtggcggctgggccctgggcagtgttgcttcacctgccaggagcccacaccctcgacaggctgctctcttgacgacaacggggttgagtttccgattggacagatctggtcgcctggtgacccctgtgagttatgcatctgccaggcagatggctcggtgagctgcaagaggacagactgtgtggactcctgccctcacccgatccggatccctggacagtgctgctcgag

SEQ ID NO: 1160 - protein, 604 aa, Homo sapiens
GTRGYTGRKPPGHFAAERRRLGPHVCLSGFGSGCCPGWAPSMGGGHCTLPPCSFGCGSGICIAPNVCSCQDGEQGATCPETHGPCGEYGCDLTCNHGGCQEVARVCPVGFSMTETAVGIRCTDIDECVTSSCEGHCVNTESGFVCECGPGMQLSADRHSCQDTDECLGTPCQQRCKNSIGSYKCSCRTGFHLHGNRHSCVDVNECRRPLERRVCHHSCHNTVGSFLCTCRPGFRLRADRVSCEAFPKAVLAPSAILQPRQHPSKMLLLLPEAGRPALSPGHSPPSGAPGPPAGVRTTRLPSPTPRLPTSSPSAPVWLLSTLLATPVPTASLLGNLRPPSLLQGEVMGTPSSPRGPESPRLAAGPSPCWHLGAMYESRSRWTEPGCSQCWCEDGKVTCEKVRCEAACSHPIPSRDGGCCPSCTGCFHSGVVRAEGDVFSPPNENCTVCVCLAGNVSCISPECPSGPCQTPPQTDCCTCVPVRCYFHGRWYADGAVFSGGGDECTTCVCQNGEVECSFMPCPELACPREEWRLGPGQCCFTCQEPTPSTGCSLDDNGVEFPIGQIWSPGDPCELCICQADGSVSCKRTDCVDSCPHPIRIPGQCCS

SEQ ID NO: 1161 - DNA, 1790 bp, Homo sapiens
  CDS (1)..(1788)
ggtacccgaggctacaccgggaggaagccgcccgggcacttcgcggccgagagacgccgactgggcccccacgtctgcctctctgggtttgggagtggctgctgccctggccgggcgccctctatgggtggtgggcactgcaccctgcccctctgctccttcggctgtgggagtggcatctgcatcgctcccaatgtctgctcctgccaggatggagagcaaggggccacctgcccagaaacccatggaccatgtggggagtacggctgtgaccttacctgcaaccatggaggctgtcaggaggtggcccgagtgtgccccgtgggcttctcgatgacggagacagctgttggcatcaggtgtacagacattgacgaatgtgtaacctcctcctgcgagggccactgtgtgaacacagaaggtgggtttgtgtgcgagtgtgggccgggcatgcagctgtctgccgaccgccacagctgccaagacactgacgaatgcctagggactccctgtcagcagagatgtaaaaacagcattggcagctacaagtgctcctgtcgaactggcttccaccttcatggcaaccggcactcctgtgtagatgtaaacgagtgtcggaggccattggagaggcgagtctgtcaccattcctgccacaacaccgtgggcagcttcctatgcacatgccgacctggcttcaggctccgagctgaccgcgtgtcctgtgaagctttcccgaaagccgtgctggccccatctgccatcctgcaaccccggcaacacccgtccaagatgcttctgttgcttcctgaggccggccggcctgccctgtccccaggacatagccctccttctggggctccagggcccccagccggagtcagaaccacccgcctgccatctcccaccccacgactacccacatcctccccttctgcccctgtgtggctgctgtccaccctgctggccaccccagtgcctactgcctccctgctggggaacctcagacccccctcactccttcagggggaggtgatggggaccccttcctcacccaggggccctgagtccccccgactggcagcagggccctctccctgctggcacctgggagcgatgcatgaatcaaggagtcgctggacagagcctgggtgttcccagtgctggtgcgaggacgggaaggtgacctgtgaaaaggtgaggtgtgaagctgcttgttcccacccaattccctccagagatggtgggtgctgcccatcgtgcacaggctgttttcacagtggtgtcgtccgagctgaaggggatgtgttttcacctcccaatgagaactgcaccgtctgtgtctgtctggctggaaacgtgtcctgcatctctcctgagggtccttctggcccctgtcagacccccccacagacggattgctgtacttgtgttccagtgagatgctatttccacggccggtggtacgcagacggggctgtgttcagtgggggtggtgacgagtgtaccacctgtgtttgccagaatggggaggtggagtgctccttcatgccctgccctgagctggcctgcccccgagaagagtggcggctgggccctgggcagtgttgcttcacctgccaggagcccacaccctcgacaggctgctctcttgacgacaacggggttgagtttccgattggacagatctggtcgcctggtgacccctatggctcggtgagctgcaagaggacagactgtgtggactcctgccctcacccgatccggatccctggacagtgctgctcgag

SEQ ID NO: 1162 - protein, 596 aa, Homo sapiens
GTRGYTGRKPPGHFAAERRRLGPHVCLSGFGSGCCPGRAPSMGGGHCTLPLCSFGCGSGICIAPNVCSCQDGEQGATCPETHGPCGEYGCDLTCNHGGCQEVARVCPVGFSMTETAVGIRCTDIDECVTSSCEGHCVNTEGGFVCECGPGMQLSADRHSCQDTDECLGTPCQQRCKNSIGSYKCSCRTGFHLHGNRHSCVDVNECRRPLERRVCHHSCHNTVGSFLCTCRPGFRLRADRVSCEAFPKAVLAPSAILQPRQHPSKMLLLLPEAGRPALSPGHSPPSGAPGPPAGVRTTRLPSPTPRLPTSSPSAPVWLLSTLLATPVPTASLLGNLRPPSLLQGEVMGTPSSPRGPESPRLAAGPSPCWHLGAMHESRSRWTEPGCSQCWCEDGKVTCEKVRCEAACSHPIPSRDGGCCPSCTGCFHSGVVRAEGDVFSPPNENCTVCVCLAGNVSCISPEGPSGPCQTPPQTDCCTCVPVRCYFHGRWYADGAVFSGGGDECTTCVCQNGEVECSFMPCPELACPREEWRLGPGQCCFTCQEPTPSTGCSLDDNGVEFPIGQIWSPGDPYGSVSCKRTDCVDSCPHPIRIPGQCCS

SEQ ID NO: 1163 - DNA, 1661 bp, Homo sapiens
  CDS (1)..(1659)
ggtacccgaggctacaccgggaggaagccgcccgggcacttcgcggccgagagacgccgactgggcccccacgtctgcctctctgggtttgggagtggctgctgccctggctgggcgccctctatgggtggtgggcactgcaccctgcccctctgctccttcggctgtgggagtggcatctgcatcgctcccaatgtctgctcctgccaggatggagagcaaggggccacctgcccagaaacccatggaccatgtggggagtacggctgtgaccttacctgcaaccatgggggctgtcaggaggtggcccgagtgtgccccgtgggcttctcgatgacggagacagctgttggcatcaggtgtacagacattgacgaatgtgtaacctcctcctgcgagggccactgtgtgaacacagaaggtgggtttgtgtgcgagtgtgggccgggcatgcagctgtctgccgaccgccacagctgccaagacactgacgaatgcctagggactccctgtcagcagagatgtaaaaacagcattggcagctacaagtgttcctgtcgaactggcttccaccttcatggcaaccggcactcctgtgtagcttccccgaaagccgtgctggccccatctgccatcctgcaaccccggcaacacccgtccaagatgcttctgttgcttcctgaggccggccggcctgccctgtccccaggacatagccctccttctggggctccagggcccccagccggagtcaggaccacccgcctgccatctcccaccccacgactacccacatcctccccttctgcccctgtgtggctgctgtccaccctgctggccaccccagtgcctactgcctccctgctggggaacctcagacccccctcactccttcagggggaggtgatggggaccccttcctcacccaggggccctgagtccccccgactggcagcagggccctctccctgctggcacctgggagccatgcatgaatcaaggagtcgctggacagagcctgggtgttcccagtgctggtgcgaggacgggaaggtgacctgtgaaaaggtgaggtgtgaagctgcttgttcccacccaattccctccagagatggtgggtgctgcccatcgtgcacaggctgttttcacagtggtgtcgtccgagctgaaggggatgtgttttcacctcccaatgagaactgcaccgtctgtgtctgtctggctggaaacgtgtcctgcatctctcctgagtgtccttctggcccctgtcagacccccccacagacggattgctgtacttgtgttccagtgagatgctatttccacggccggtggtacgcagacagggctgtgttcagtgggggtggtgacgagtgtaccacctgtgtttgccagaatggggaggtggagtgctccttcatgccctgccctgagctggcctgcccccgagaagagtggcggctgggccctgggcagtgttgcttcacctgccaggagcccacaccctcgacaggctgctctcttgacgacaacggggttgagtttccgattggacagatctggtcgcctggtgacccctatggctcggtgagctgcaagaggacagactgtgtggactcctgccctcacccgatccggatccctggacagtgctgctcgag

SEQ ID NO: 1164 - protein, 553 aa, Homo sapiens
GTRGYTGRKPPGHFAAERRRLGPHVCLSGFGSGCCPGWAPSMGGGHCTLPLCSFGCGSGICIAPNVCSCQDGEQGATCPETHGPCGEYGCDLTCNHGGCQEVARVCPVGFSMTETAVGIRCTDIDECVTSSCEGHCVNTEGGFVCECGPGMQLSADRHSCQDTDECLGTPCQQRCKNSIGSYKCSCRTGFHLHGNRHSCVASPKAVLAPSAILQPRQHPSKMLLLLPEAGRPALSPGHSPPSGAPGPPAGVRTTRLPSPTPRLPTSSPSAPVWLLSTLLATPVPTASLLGNLRPPSLLQGEVMGTPSSPRGPESPRLAAGPSPCWHLGAMHESRSRWTEPGCSQCWCEDGKVTCEKVRCEAACSHPIPSRDGGCCPSCTGCFHSGVVRAEGDVFSPPNENCTVCVCLAGNVSCISPECPSGPCQTPPQTDCCTCVPVRCYFHGRWYADRAVFSGGGDECTTCVCQNGEVECSFMPCPELACPREEWRLGPGQCCFTCQEPTPSTGCSLDDNGVEFPIGQIWSPGDPYGSVSCKRTDCVDSCPHPIRIPGQCCS

SEQ ID NO: 1165 - DNA, 1814 bp, Homo sapiens
  CDS (1)..(1812)
ggtacccgaggctacaccgggaagaagccgcccgggcacttcgcggccgagagacgccgactgggcccccacgtctgcctctctgggtttgggagtggctgctgccctggctgggcgccctctatgggtggtgggcactgcaccctgcccctctgctccttcggctgtgggagtggcatctgcatcgctcccaatgtctgctcctgccaggatggagagcaaggggccacctgcccagaaacccatggaccatgtggggagtacggctgtgaccttacctgcaaccatggaggctgtcaggaggtggcccgagtgtgccccgtgggcttctcgatgacggagacagctgttggcatcaggtgtacagacattgacgaatgtgtaacctcctcctgcgagggccactgtgtgaacacagaaggtgggtttgtgtgcgagtgtgggccgggcatgcagctgtctgccgaccgccacagctgccaagacactgacgaatgcctagggactccctgtcagcagagatgtaaaaacagcattggcagctacaagtgctcctgtcgaactggcttccaccttcatggcaaccggcactcctgtgtagatgtaaacgagtgtcggaggccattggagaggcgagtctgtcaccattcctgccacaacaccgtgggcagcttcctatgcacatgccgacctggcttcaggctccgagctgaccgcgtgtcctgtgaagctttcccgaaagccgtgctggccccatctgccatcctgcaaccccggcaacacccgtccaagatgcttctgttgcttcctgaggccggccggcctgccctgtccccaggacatagccctccttctggggctccagggcccccagccggagtcaggaccacccgcctgccatctcccaccccacgactacccacatcctccccttctgcccctgtgtggctgctgtccaccctgctggccaccccagtgcctactgcctccctgctggggaacctcagacccccctcactccttcagggggaggtgatggggaccccttcctcacccaggggccctgagtccccccgactggcagcagggccctctccctgctggcacctgggagcgatgcatgaatcaaggagtcgctggacagagcctgggtgttcccagtgctggtgcgaggacgggaaggtgacctgtgaaaaggtgcggtgtgaagctgcttgttcccacccaattccctccagagatggtgggtgctgcccatcgtgcacaggctgttttcacagtggtgtcgtccgagctgaaggggatgtgttttcacctcccaatgagaactgcaccgtctgtgtctgtctggctggaaacgtgtcctgcatctctcctgagtgtccttctggcccctgtcagacccccccacagacggattgctgtacttgtgttccagtgagatgctatttccacggccggtggtacgcagacggggctgtgttcagtgggggtggtgacgagtgtaccacctgtgtttgccagaatggggaggtggagtgctccttcatgccctgccctgagctggcctgcccccgagaagagtggcggccgggccctgggcagtgttgcttcacctgccaggagcccacaccctcgacaggctgctctcttgacgacaacggggttgagtttccgattggacagatctggtcgcctggtgacccctgtgagttatgcatctgccaggcagatggctcggtgagctgcaagaggacagactgtgtggactcctgccctcacccgatccggatccctggacagtgctgctcgag

SEQ ID NO: 1166 - protein, 604 aa, Homo sapiens
GTRGYTGKKPPGHFAAERRRLGPHVCLSGFGSGCCPGWAPSMGGGHCTLPLCSFGCGSGICIAPNVCSCQDGEQGATCPETHGPCGEYGCDLTCNHGGCQEVARVCPVGFSMTETAVGIRCTDIDECVTSSCEGHCVNTEGGFVCECGPGMQLSADRHSCQDTDECLGTPCQQRCKNSIGSYKCSCRTGFHLHGNRHSCVDVNECRRPLERRVCHHSCHNTVGSFLCTCRPGFRLRADRVSCEAFPKAVLAPSAILQPRQHPSKMLLLLPEAGRPALSPGHSPPSGAPGPPAGVRTTRLPSPTPRLPTSSPSAPVWLLSTLLATPVPTASLLGNLRPPSLLQGEVMGTPSSPRGPESPRLAAGPSPCWHLGAMHESRSRWTEPGCSQCWCEDGKVTCEKVRCEAACSHPIPSRDGGCCPSCTGCFHSGVVRAEGDVFSPPNENCTVCVCLAGNVSCISPECPSGPCQTPPQTDCCTCVPVRCYFHGRWYADGAVFSGGGDECTTCVCQNGEVECSFMPCPELACPREEWRPGPGQCCFTCQEPTPSTGCSLDDNGVEFPIGQIWSPGDPCELCICQADGSVSCKRTDCVDSCPHPIRIPGQCCS

SEQ ID NO: 1167 - DNA, 585 bp, Homo sapiens
  CDS (7)..(579)
ggtacctgctccttcggctgtgggagtggcatctgcatcgctcctaatgtctgctcctgccaggatggagagcaaggggccacctgcccagaaacccatggaccatgtggggagtacggctgtgaccttacctgcaaccatggaggctgtcaggaggtggcccgagtgtgccccgtgggcttctcgatgacggagacagctgttggcatcaggtgtacagacattgacgaatgtgtaacctcctcctgcgagggccactgtgtgaacacagaaggtgggtttgtgtgcgagtgtgggccgggcatgcagctgtctgccgaccgccacagctgccaagacactgacgaatgcctagggactccctgtcagcagggatgtaaaaacagcattggcagctacaagtgttcctgtcgaactggcttccaccttcatggcaaccggcactcctgtgtagatgtaaacgagtgtcggaggccattggagaggcgagtctgtcaccattcctgccacaacaccgtgggcagcttcctatgcacatgccgacctcgagacaggctccgagctgaccgcgtgtcctgtctcgag

SEQ ID NO: 1168 - protein, 191 aa, Homo sapiens
CSFGCGSGICIAPNVCSCQDGEQGATCPETHGPCGEYGCDLTCNHGGCQEVARVCPVGFSMTETAVGIRCTDIDECVTSSCEGHCVNTEGGFVCECGPGMQLSADRHSCQDTDECLGTPCQQGCKNSIGSYKCSCRTGFHLHGNRHSCVDVNECRRPLERRVCHHSCHNTVGSFLCTCRPRDRLRADRVSC

SEQ ID NO: 1169 - DNA, 2063 bp, Homo sapiens
  CDS (20)..(1228)
agtgttacagttcttcaagatggtgtgtccggagtttgttccttcagatgttcagatgtgtccagaatttcttccttctggtgggttcgtgctctcactggcttcaatgggtggtgggcactgcaccctgcccctctgctccttcggctgtgggagtggcatctgcatcgctcccaatgtctgctcctgccaggatggagagcaaggggccacctgcccagaaacccatggaccatgtggggagtacggctgtgaccttacctgcaaccatggaggctgtcaggaggtggcccgagtgtgccccgtgggcttctcgatgacggagacagctgttggcatcaggtgtacagacattgacgaatgtgtaacctcctcctgcgagggccactgtgtgaacacagaaggtgggtttgtgtgcgagtgtgggccgggcatgcagctgtctgccgaccgccacagctgccaagacactgacgaatgcctagggactccctgtcagcagagatgtaaaaacagcattggcagctacaagtgttcctgtcgaactggcttccaccttcatggcaaccggcactcctgtgtagatgtaaacgagtgtcggaggccattggagaggcgagtctgtcaccattcctgccacaacaccgtgggcagcttcctatgcacatgccgacctggcttcaggctccgagctgaccgcgtgtcctgtgaagctttcccgaaagccgtgctggccccatctgccatcctgcaaccccggcaacacccgtccaagatgcttctgttgcttcctgaggccggccggcctgccctgtccccaggacatagccctccttctggggctccagggcccccagccggagtcaggaccacccgcctgccatctcccaccccacgactacccacatcctccccttctgcccctgtgtggctgctgtccaccctgctggccaccccagtgcctactgcctccctgctggggaacctcagacccccctcactccttcagggggaggtgatgaggaccccttcctcacccaggggccctgagtccccccgactggcagcagggccctctccctgctggcacctgggagccatgcatgaatcaaggagtcgctggacagagcctgggtgttcccagtgctggtgcgaggtgggtactaggggtccccggagcttccttggtctggggccttgtggtggctctaactcctgcttgtgcttctaggacgggaaggtgacctgtgaaaaggtgaggtgtgaagctgcttgttcccacccaattccctccagagatggtgggtgctgcccatcgtgcacaggtgagagctggtgccagggaaggacatagtcctgcctcttcctttctctgcaccctcctgcagccaaaaggctgttctttaacattagcatacattagaatctcctggagggtttactaagccacacttcccttggcgctgctcccagagcttctgatgtagtaggtctgggatagggccagaacatgtgcgttttgaacaggttcccaggtgatactgacgtggctggtctagggaccatactttgagaaccactcatttatgctgtaatatgcctcaagggggacttttcatcttctgggcatctgttttcagcttcattcgctcattttcatttattcagtcattcattgagcctctttaaatccactgtgcagtccccttctctttccgactcaccttctcacatggggaggagtagttgctttacaattccccccctttttaatctccccccccccatatatcgatacttctttatcttcttcccattcctggaagaatagggacccatattcttcaccaaatcctcaactagagtttcttctgaactacctctccagcccctcaagggtattctgatgacaaatacaaattcttctcgttggcacgctgtctctatcgcagaaccccaccactttgggagtccaattttgtcttatcacttgagcggaccattcagggactgtttgggatactcggtgataaacgtcgagcattcgtctttctatctcctca

SEQ ID NO: 1170 - protein, 403 aa, Homo sapiens
MVCPEFVPSDVQMCPEFLPSGGFVLSLASMGGGHCTLPLCSFGCGSGICIAPNVCSCQDGEQGATCPETHGPCGEYGCDLTCNHGGCQEVARVCPVGFSMTETAVGIRCTDIDECVTSSCEGHCVNTEGGFVCECGPGMQLSADRHSCQDTDECLGTPCQQRCKNSIGSYKCSCRTGFHLHGNRHSCVDVNECRRPLERRVCHHSCHNTVGSFLCTCRPGFRLRADRVSCEAFPKAVLAPSAILQPRQHPSKMLLLLPEAGRPALSPGHSPPSGAPGPPAGVRTTRLPSPTPRLPTSSPSAPVWLLSTLLATPVPTASLLGNLRPPSLLQGEVMRTPSSPRGPESPRLAAGPSPCWHLGAMHESRSRWTEPGCSQCWCEVGTRGPRSFLGLGPCGGSNSCLCF

SEQ ID NO: 1171 - DNA, 1790 bp, Homo sapiens; identical to SEQ ID NO: 1161
  CDS (1)..(1788)

SEQ ID NO: 1172 - protein, 596 aa, Homo sapiens; identical to SEQ ID NO: 1162

SEQ ID NO: 1173 - DNA, 6224 bp, Homo sapiens
  CDS (37)..(6195)
ccggcgcggcccgcgcgctcttccgccgcctctcgcatgcgccatggccggccggtcccacccgggcccgctgcggggcggccgctgctgcctctccttgtggtggccgcgtgcgtcctgcccggagccggcgggacatgcccggagcgcgcgctggagcggcgcgaggaggaggcgaacgtggtgctcaccgggacggtggaggagatcctcaacgtggacccggtgcagcacacgtactcctgcaaggttcgggtctggcggtacttgaagggcaaagacctggtggcccgggagagcctgctggacggcggcaacaaggtggtgatcagcggctttggagaccccctcatctgtgacaaccaggtgtccactggggacaccaggatcttctttgtgaaccctgcacccccatacctgtggccagcccacaagaacgagctgatgctcaactccagcctcatgcggatcaccctgcggaacctggaggaggtggagttctgtgtggaagataaacccgggacccacttcactccagtgcctccgacgcctcctgatgcgtgccggggaatgctgtgcggcttcggcgccgtgtgcgagcccaacgcggaggggccgggccgggcgtcctgcgtctgcaagaagagcccgtgccccagcgtggtggcgcctgtgtgtgggtcggacgcctccacctacagcaacgaatgcgagctgcagcgggcgcagtgcagccagcagcgccgcatccgcctgctcagccgcgggccgtgcggctcgcgggacccctgctccaacgtgacctgcagcttcggcagcacctgtgcgcgctcggccgacgggctgacggcctcgtgcctgtgccccgcgacctgccgtggcgcccccgaggggaccgtctgcggcagcgacggcgccgactaccccggcgagtgccagctcctgcgccgcgcctgcgcccgccaggagaatgtcttcaagaagttcgacggcccttgtgacccctgtcagggcgccctccctgacccgagccgcagctgccgtgtgaacccgcgcacgcggcgccctgagatgctcctacggcccgagagctgccctgcccggcaggcgccagtgtgtggggacgacggagtcacctacgaaaacgactgtgtcatgggccgatcgggggccgcccggggtctcctcctgcagaaagtgcgctccggccagtgccagggtcgagaccagtgcccggagccctgccggttcaatgccgtgtgcctgtcccgccgtggccgtccccgctgctcctgcgaccgcgtcacctgtgacggggcctacaggcccgtgtgtgcccaggacgggcgcacgtatgacagtgattgctggcggcagcaggctgagtgccggcagcagcgtgccatccccagcaagcaccagggcccgtgtgaccaggccccgtccccatgcctcggggtgcagtgtgcatttggggcgacgtgtgctgtgaagaacgggcaggcagcgtgtgaatgcctgcaggcgtgctcgagcctctacgatcctgtgtgcggcagcgacggcgtcacatacggcagcgcgtgcgagctggaggccacggcctgtaccctcgggcgggagatccaggtggcgcgcaaaggaccctgtgaccgctgcgggcagtgccgctttggagccctgtgcgaggccgagaccgggcgctgcgtgtgcccctctgaatgcgtggctttggcccagcccgtgtgtggctccgacgggcacacgtaccccagcgagtgcatgctgcacgtgcacgcctgcacacaccagatcagcctgcacgtggcctcagctggaccctgtgagacctgtggagatgccgtgtgtgcttttggggctgtgtgctccgcagggcagtgtgtgtgtccccggtgtgagcaccccccgcccggccccgtgtgtggcagcgacggtgtcacctacggcagtgcctgcgagctacgggaagccgcctgcctccagcagacacagatcgaggaggcccgggcagggccgtgcgagcaggccgagtgcggttccggaggctctggctctggggaggacggtgactgtgagcaggagctgtgccggcagcgcggtggcatctgggacgaggactcggaggacgggccgtgtgtctgtgacttcagctgccagagtgtcccaggcagcccggtgtgcggctcagatggggtcacctacagcaccgagtgtgagctgaagaaggccaggtgtgagtcacagcgagggctctacgtagcggcccagggagcctgccgaggccccgccttcgccccgctgccgcctgtggcccccttacactgtgcccagacgccctacggctgctgccaggacaatatcaccgcagcccggggcgtgggcctggctggctgccccagtgcctgccagtgcaacccccatggctcttacggcggcacctgtgacccagccacaggccagtgctcctgccgcccaggtgtggggggcctcaggtgtgaccgctgtgagcctggcttctggaactttcgaggcatcgtcaccgatggccggagtggctgtacaccctgcagctgtgatccccaaggcgccgtgcgggatgactgtgagcagatgacggggctgtgctcgtgtaagcccggggtggctggacccaagtgtgggcagtgtccagacggccgtgccctgggccccgcgggctgtgaagctgacgcttctgcgcctgcgacctgtgcggagatgcgctgtgagttcggtgcgcggtgcgtggaggagtctggctcagcccactgtgtctgcccgatgctcacctgtccagaggccaacgctaccaaggtctgtgggtcagatggagtcacatacggcaacgagtgtcagctgaagaccatcgcctgccgccagggcctgcaaatctctatccagagcctgggcccgtgccaggaggctgttgctcccagcactcacccgacatctgcctccgtgactgtgaccaccccagggctcctcctgagccaggcactgccggccccccccggcgccctccccctggctcccagcagtaccgcacacagccagaccacccctccgccctcatcgcgacctcggaccactgccagcgtccccaggaccaccgtgtggcccgtgctgacggtgccccccacggcaccctcccctgcacccagcctggtggcgtccgcctttggtgaatctggcagcactgatggaagcagcgatgaggaactgagcggggaccaggaggccagtgggggtggctctggggggctcgagcccttggagggcagcagcgtggccacccctgggccacctgtcgagagggcttcctgctacaactccgcgttgggctgctgctctgatgggaagacgccctcgctggacgcagagggctccaactgccccgccaccaaggtgttccagggcgtcctggagctggagggcgtcgagggccaggagctgttctacacgcccgagatggctgaccccaagtcagaactgttcggggagacagccaggagcattgagagcaccctggacgacctcttccggaattcagacgtcaagaaggatttccggagtgtccgcttgcgggacctggggcccggcaaatccgtccgcgccattgtggatgtgcactttgaccccaccacagccttcagggcacccgacgtggcccgggccctgctccggcagatccaggtgtccaggcgccggtccttgggggtgaggcggccgctgcaggagcacgtgcgatttatggactttgactggtttcctgcgtttatcacgggggccacgtcaggagccattgctgcgggagccacggccagagccaccactgcatcgcgcctgccgtcctctgctgtgacccctcgggccccgcaccccagtcacacaagccagcccgttgccaagaccacggcagcccccaccacacgtcggccccccaccactgcccccagccgtgtgcccggacgtcggcccccggccccccagcagcctccaaagccctgtgactcacagccctgcttccacggggggacctgccaggactgggcattgggcgggggcttcacctgcagctgcccggcaggcaggggaggcgccgtctgtgagaaggtgcttggcgcccctgtgccggccttcgagggccgctccttcctggccttccccaccctccgcgcctaccacacgctgcgcctggcactggaattccgggcgctggagcctcaggggctgctgctgtacaatggcaacgcccggggcaaggacttcctggcattggcgctgctagatggccgcgtgcagctcaggtttgacacaggttcggggccggcggtgctgaccagtgccgtgccggtagagccgggccagtggcaccgcctggagctgtcccggcactggcgccggggcaccctctcggtggatggtgagacccctgttctgggcgagagtcccagtggcaccgacggcctcaacctggacacagacctctttgtgggcggcgtacccgaggaccaggctgccgtggcgctggagcggaccttcgtgggcgccggcctgagggggtgcatccgtttgctggacgtcaacaaccagcgcctggagcttggcattgggccgggggctgccacccgaggctctggcgtgggcgagtgcggggaccacccctgcctgcccaacccctgccatggcggggccccatgccagaacctggaggctggaaggttccattgccagtgcccgcccggccgcgtcggaccaacctgtgccgatgagaagagcccctgccagcccaacccctgccatggggcggcgccctgccgtgtgctgcccgagggtggtgctcagtgcgagtgccccctggggcgtgagggcaccttctgccagacagcctcggggcaggacggctctgggcccttcctggctgacttcaacggcttctcccacctggagctgagaggcctgcacaccattgcacgggacctgggggagaagatggcgctggaggccgtgttcctggcacgaggccccagcggcctcctgctctacaacgggcagaagacggacggcaagggggacttcgtgtcgctggcactgcgggaccgccgcctggagttccgctacgacctgggcaagggggcagcggtcatcaggagcagggagccagtcaccctgggagcctggaccagggtctcactggagcgaaacggccgcaagggtgccctgcgtgtgggcgacggcccccgtgtgttgggggagtccccgaaatcccgcaaggttccgcacaccgtcctcaacctgaaggagccgctctacgtagggggcgctcccgacttcagcaagctggcccgtgctgctgccgtgtcctctggcttcgacggtgccatccagctggtctccctcggaggccgccagctgctgaccccggagcacgtgctgcggcaggtggacgtcacgtcctttgcaggtcacccctgcacccgggcctcaggccacccctgcctcaatggggcctcctgcgtcccgagggaggctgcctatgtgtgcctgtgtcccgggggattctcaggaccgcactgcgagaaggggctggtggagaagtcagcgggggacgtggataccttggcctttgacgggcggacctttgtcgagtacctcaacgctgtgaccgagagcgagaaggcactgcagagcaaccactttgaactgagcctgcgcactgaggccacgcaggggctggtgctctggagtggcaaggccacggagcgggcagactatgtggcactggccattgtggacgggcacctgcaactgagctacaacctgggctcccagcccgtggtgctgcgttccaccgtgcccgtcaacaccaaccgctggttgcgggtcgtggcacatagggagcagagggaaggttccctgcaggtgggcaatgaggcccctgtgaccggctcctccccgctgggcgccacgcagctggacactgatggagccctgtggcttgggggcctgccggagctgcccgtgggcccagcactgcccaaggcctacggcacaggctttgtgggctgcttgcgggatgtggtggtgggccggcacccgctgcacctgctggaggacgccgtcaccaagccagagctgcggccctgccccaccccatgagctggcaccagagccccgcgcccgct

SEQ ID NO: 1174 - protein, 2053 aa, Homo sapiens
MRHGRPVPPGPAAGRPLLPLLVVAACVLPGAGGTCPERALERREEEANVVLTGTVEEILNVDPVQHTYSCKVRVWRYLKGKDLVARESLLDGGNKVVISGFGDPLICDNQVSTGDTRIFFVNPAPPYLWPAHKNELMLNSSLMRITLRNLEEVEFCVEDKPGTHFTPVPPTPPDACRGMLCGFGAVCEPNAEGPGRASCVCKKSPCPSVVAPVCGSDASTYSNECELQRAQCSQQRRIRLLSRGPCGSRDPCSNVTCSFGSTCARSADGLTASCLCPATCRGAPEGTVCGSDGADYPGECQLLRRACARQENVFKKFDGPCDPCQGALPDPSRSCRVNPRTRRPEMLLRPESCPARQAPVCGDDGVTYENDCVMGRSGAARGLLLQKVRSGQCQGRDQCPEPCRFNAVCLSRRGRPRCSCDRVTCDGAYRPVCAQDGRTYDSDCWRQQAECRQQRAIPSKHQGPCDQAPSPCLGVQCAFGATCAVKNGQAACECLQACSSLYDPVCGSDGVTYGSACELEATACTLGREIQVARKGPCDRCGQCRFGALCEAETGRCVCPSECVALAQPVCGSDGHTYPSECMLHVHACTHQISLHVASAGPCETCGDAVCAFGAVCSAGQCVCPRCEHPPPGPVCGSDGVTYGSACELREAACLQQTQIEEARAGPCEQAECGSGGSGSGEDGDCEQELCRQRGGIWDEDSEDGPCVCDFSCQSVPGSPVCGSDGVTYSTECELKKARCESQRGLYVAAQGACRGPAFAPLPPVAPLHCAQTPYGCCQDNITAARGVGLAGCPSACQCNPHGSYGGTCDPATGQCSCRPGVGGLRCDRCEPGFWNFRGIVTDGRSGCTPCSCDPQGAVRDDCEQMTGLCSCKPGVAGPKCGQCPDGRALGPAGCEADASAPATCAEMRCEFGARCVEESGSAHCVCPMLTCPEANATKVCGSDGVTYGNECQLKTIACRQGLQISIQSLGPCQEAVAPSTHPTSASVTVTTPGLLLSQALPAPPGALPLAPSSTAHSQTTPPPSSRPRTTASVPRTTVWPVLTVPPTAPSPAPSLVASAFGESGSTDGSSDEELSGDQEASGGGSGGLEPLEGSSVATPGPPVERASCYNSALGCCSDGKTPSLDAEGSNCPATKVFQGVLELEGVEGQELFYTPEMADPKSELFGETARSIESTLDDLFRNSDVKKDFRSVRLRDLGPGKSVRAIVDVHFDPTTAFRAPDVARALLRQIQVSRRRSLGVRRPLQEHVRFMDFDWFPAFITGATSGAIAAGATARATTASRLPSSAVTPRAPHPSHTSQPVAKTTAAPTTRRPPTTAPSRVPGRRPPAPQQPPKPCDSQPCFHGGTCQDWALGGGFTCSCPAGRGGAVCEKVLGAPVPAFEGRSFLAFPTLRAYHTLRLALEFRALEPQGLLLYNGNARGKDFLALALLDGRVQLRFDTGSGPAVLTSAVPVEPGQWHRLELSRHWRRGTLSVDGETPVLGESPSGTDGLNLDTDLFVGGVPEDQAAVALERTFVGAGLRGCIRLLDVNNQRLELGIGPGAATRGSGVGECGDHPCLPNPCHGGAPCQNLEAGRFHCQCPPGRVGPTCADEKSPCQPNPCHGAAPCRVLPEGGAQCECPLGREGTFCQTASGQDGSGPFLADFNGFSHLELRGLHTIARDLGEKMALEAVFLARGPSGLLLYNGQKTDGKGDFVSLALRDRRLEFRYDLGKGAAVIRSREPVTLGAWTRVSLERNGRKGALRVGDGPRVLGESPKSRKVPHTVLNLKEPLYVGGAPDFSKLARAAAVSSGFDGAIQLVSLGGRQLLTPEHVLRQVDVTSFAGHPCTRASGHPCLNGASCVPREAAYVCLCPGGFSGPHCEKGLVEKSAGDVDTLAFDGRTFVEYLNAVTESEKALQSNHFELSLRTEATQGLVLWSGKATERADYVALAIVDGHLQLSYNLGSQPVVLRSTVPVNTNRWLRVVAHREQREGSLQVGNEAPVTGSSPLGATQLDTDGALWLGGLPELPVGPALPKAYGTGFVGCLRDVVVGRHPLHLLEDAVTKPELRPCPTP

SEQ ID NO: 1175 - DNA, 388 bp, Homo sapiens
  CDS (2)..(388)
caccggatccgccaccaaggtgttccagggcgtcctggagctggagggcgtcgagggccaggagctgttctacacgcccgagatggctgaccccaagtcagaactgttcggggagacagccaggagcattgagagcaccctggacgacctcttccggaattcagacgtcaagaaggatttccggagtgtccgcttgcgggacctggggcccggcaaatccgtccgcgccattgtggatgtgcactttgaccccaccacagccttcagggcacccgacgtggcccgggccctgctccggcagatccaggtgtccaggcgccggtccttgggggtgaggcggccgctgcaggagcacgtgcgatttatggactttgactgggtcgacggc

SEQ ID NO: 1176 - protein, 129 aa, Homo sapiens
TGSATKVFQGVLELEGVEGQELFYTPEMADPKSELFGETARSIESTLDDLFRNSDVKKDFRSVRLRDLGPGKSVRAIVDVHFDPTTAFRAPDVARALLRQIQVSRRRSLGVRRPLQEHVRFMDFDWVDG

SEQ ID NO: 1177 - DNA, 316 bp, Homo sapiens
  CDS (2)..(316)
caccggatcctgccagtgcaacccccatggctcttacggcggcacctgtgacccagccacaggccagtgctcctgccgcccaggtgtggggggcctcaggtgtgaccgctgtgagcctggcttctggaactttcgaggcatcgtcaccgatggccggagtggctgtacaccctgcagctgtgatccccaaggcgccgtgcgggatgactgtgagcagatgacggggctgtgctcgtgtaagcccggggtggctggacccaagtgtgggcagtgtccagacggccgtgccctgggccccgcgggctgtgtcgacggc

SEQ ID NO: 1178 - protein, 105 aa, Homo sapiens
TGSCQCNPHGSYGGTCDPATGQCSCRPGVGGLRCDRCEPGFWNFRGIVTDGRSGCTPCSCDPQGAVRDDCEQMTGLCSCKPGVAGPKCGQCPDGRALGPAGCVDG

SEQ ID NO: 1179 - DNA, 4760 bp, Homo sapiens
  CDS (37)..(4731)
ccggcgcggcccgcgcgctcttccgccgcctctcgcatgcgccatggccggccggtcccacccgggcccgctgcggggcggccgctgctgcctctccttgtggtggccgcgtgcgtcctgcccggagccggcgggacatgcccggagcgcgcgctggagcggcgcgaggaggaggcgaacgtggtgctcaccgggacggtggaggagatcctcaacgtggacccggtgcagcacacgtactcctgcaaggttcgggtctggcggtacttgaagggcaaagacctggtggcccgggagagcctgctggacggcggcaacaaggtggtgatcagcggctttggagaccccctcatctgtgacaaccaggtgtccactggggacaccaggatcttctttgtgaaccctgcacccccatacctgtggccagcccacaagaacgagctgatgctcaactccagcctcatgcggatcaccctgcggaacctggaggaggtggagttctgtgtggaagataaacccgggacccacttcactccagtgcctccgacgcctcctgatgcgtgccggggaatgctgtgcggcttcggcgccgtgtgcgagcccaacgcggaggggccgggccgggcgtcctgcgtctgcaagaagagcccgtgccccagcgtggtggcgcctgtgtgtgggtcggacgcctccacctacagcaacgaatgcgagctgcagcgggcgcagtgcagccagcagcgccgcatccgcctgctcagccgcgggccgtgcggctcgcgggacccctgctccaacgtgacctgcagcttcggcagcacctgtgcgcgctcggccgacgggctgacggcctcgtgcctgtgccccgcgacctgccgtggcgcccccgaggggaccgtctgcggcagcgacggcgccgactaccccggcgagtgccagctcctgcgccgcgcctgcgcccgccaggagaatgtcttcaagaagttcgacggcccttgtgacccctgtcagggcgccctccctgacccgagccgcagctgccgtgtgaacccgcgcacgcggcgccctgagatgctcctacggcccgagagctgccctgcccggcaggcgccagtgtgtggggacgacggagtcacctacgaaaacgactgtgtcatgggccgatcgggggccgcccggggtctcctcctgcagaaagtgcgctccggccagtgccagggtcgagaccagtgcccggagccctgccggttcaatgccgtgtgcctgtcccgccgtggccgtccccgctgctcctgcgaccgcgtcacctgtgacggggcctacaggcccgtgtgtgcccaggacgggcgcacgtatgacagtgattgctggcggcagcaggctgagtgccggcagcagcgtgccatccccagcaagcaccagggcccgtgtgaccaggccccgtccccatgcctcggggtgcagtgtgcatttggggcgacgtgtgctgtgaagaacgggcaggcagcgtgtgaatgcctgcaggcgtgctcgagcctctacgatcctgtgtgcggcagcgacggcgtcacatacggcagcgcgtgcgagctggaggccacggcctgtaccctcgggcgggagatccaggtggcgcgcaaaggaccctgtgaccgctgcgggcagtgccgctttggagccctgtgcgaggccgagaccgggcgctgcgtgtgcccctctgaatgcgtggctttggcccagcccgtgtgtggctccgacgggcacacgtaccccagcgagtgcatgctgcacgtgcacgcctgcacacaccagatcagcctgcacgtggcctcagctggaccctgtgagacctgtggagatgccgtgtgtgcttttggggctgtgtgctccgcagggcagtgtgtgtgtccccggtgtgagcaccccccgcccggccccgtgtgtggcagcgacggtgtcacctacggcagtgcctgcgagctacgggaagccgcctgcctccagcagacacagatcgaggaggcccgggcagggccgtgcgagcaggccgagtgcggttccggaggctctggctctggggaggacggtgactgtgagcaggagctgtgccggcagcgcggtggcatctgggacgaggactcggaggacgggccgtgtgtctgtgacttcagctgccagagtgtcccaggcagcccggtgtgcggctcagatggggtcacctacagcaccgagtgtgagctgaagaaggccaggtgtgagtcacagcgagggctctacgtagcggcccagggagcctgccgaggccccgccttcgccccgctgccgcctgtggcccccttacactgtgcccagacgccctacggctgctgccaggacaatatcaccgcagcccggggcgtgggcctggctggctgccccagtgcctgccagtgcaacccccatggctcttacggcggcacctgtgacccagccacaggccagtgctcctgccgcccaggtgtggggggcctcaggtgtgaccgctgtgagcctggcttctggaactttcgaggcatcgtcaccgatggccggagtggctgtacaccctgcagctgtgatccccaaggcgccgtgcgggatgactgtgagcagatgacggggctgtgctcgtgtaagcccggggtggctggacccaagtgtgggcagtgtccagacggccgtgccctgggccccgcgggctgtgaagctgacgcttctgcgcctgcgacctgtgcggagatgcgctgtgagttcggtgcgcggtgcgtggaggagtctggctcagcccactgtgtctgcccgatgctcacctgtccagaggccaacgctaccaaggtctgtgggtcagatggagtcacatacggcaacgagtgtcagctgaagaccatcgcctgccgccagggcctgcaaatctctatccagagcctgggcccgtgccaggaggctgttgctcccagcactcacccgacatctgcctccgtgactgtgaccaccccagggctcctcctgagccaggcactgccggccccccccggcgccctccccctggctcccagcagtaccgcacacagccagaccacccctccgccctcatcgcgacctcggaccactgccagcgtccccaggaccaccgtgtggcccgtgctgacggtgccccccacggcaccctcccctgcacccagcctggtggcgtccgcctttggtgaatctggcagcactgatggaagcagcgatgaggaactgagcggggaccaggaggccagtgggggtggctctggggggctcgagcccttggagggcagcagcgtggccacccctgggccacctgtcgagagggcttcctgctacaacccctgccatggggcggcgccctgccgtgtgctgcccgagggtggtgctcagtgcgagtgccccctggggcgtgagggcaccttctgccagacagcctcggggcaggacggctctgggcccttcctggctgacttcaacggcttctcccacctggagctgagaggcctgcacaccattgcacgggacctgggggagaagatggcgctggaggccgtgttcctggcacgaggccccagcggcctcctgctctacaacgggcagaagacggacggcaagggggacttcgtgtcgctggcactgcgggaccgccgcctggagttccgctacgacctgggcaagggggcagcggtcatcaggagcagggagccagtcaccctgggagcctggaccagggtctcactggagcgaaacggccgcaagggtgccctgcgtgtgggcgacggcccccgtgtgttgggggagtccccgaaatcccgcaaggttccgcacaccgtcctcaacctgaaggagccgctctacgtagggggcgctcccgacttcagcaagctggcccgtgctgctgccgtgtcctctggcttcgacggtgccatccagctggtctccctcggaggccgccagctgctgaccccggagcacgtgctgcggcaggtggacgtcacgtcctttgcaggtcacccctgcacccgggcctcaggccacccctgcctcaatggggcctcctgcgtcccgagggaggctgcctatgtgtgcctgtgtcccgggggattctcaggaccgcactgcgagaaggggctggtggagaagtcagcgggggacgtggataccttggcctttgacgggcggacctttgtcgagtacctcaacgctgtgaccgagagcgagaaggcactgcagagcaaccactttgaactgagcctgcgcactgaggccacgcaggggctggtgctctggagtggcaaggccacggagcgggcagactatgtggcactggccattgtggacgggcacctgcaactgagctacaacctgggctcccagcccgtggtgctgcgttccaccgtgcccgtcaacaccaaccgctggttgcgggtcgtggcacatagggagcagagggaaggttccctgcaggtgggcaatgaggcccctgtgaccggctcctccccgctgggcgccacgcagctggacactgatggagccctgtggcttgggggcctgccggagctgcccgtgggcccagcactgcccaaggcctacggcacaggctttgtgggctgcttgcgggatgtggtggtgggccggcacccgctgcacctgctggaggacgccgtcaccaagccagagctgcggccctgccccaccccatgagctggcaccagagccccgcgcccgct

SEQ ID NO: 1180 - protein, 1565 aa, Homo sapiens
MRHGRPVPPGPAAGRPLLPLLVVAACVLPGAGGTCPERALERREEEANVVLTGTVEEILNVDPVQHTYSCKVRVWRYLKGKDLVARESLLDGGNKVVISGFGDPLICDNQVSTGDTRIFFVNPAPPYLWPAHKNELMLNSSLMRITLRNLEEVEFCVEDKPGTHFTPVPPTPPDACRGMLCGFGAVCEPNAEGPGRASCVCKKSPCPSVVAPVCGSDASTYSNECELQRAQCSQQRRIRLLSRGPCGSRDPCSNVTCSFGSTCARSADGLTASCLCPATCRGAPEGTVCGSDGADYPGECQLLRRACARQENVFKKFDGPCDPCQGALPDPSRSCRVNPRTRRPEMLLRPESCPARQAPVCGDDGVTYENDCVMGRSGAARGLLLQKVRSGQCQGRDQCPEPCRFNAVCLSRRGRPRCSCDRVTCDGAYRPVCAQDGRTYDSDCWRQQAECRQQRAIPSKHQGPCDQAPSPCLGVQCAFGATCAVKNGQAACECLQACSSLYDPVCGSDGVTYGSACELEATACTLGREIQVARKGPCDRCGQCRFGALCEAETGRCVCPSECVALAQPVCGSDGHTYPSECMLHVHACTHQISLHVASAGPCETCGDAVCAFGAVCSAGQCVCPRCEHPPPGPVCGSDGVTYGSACELREAACLQQTQIEEARAGPCEQAECGSGGSGSGEDGDCEQELCRQRGGIWDEDSEDGPCVCDFSCQSVPGSPVCGSDGVTYSTECELKKARCESQRGLYVAAQGACRGPAFAPLPPVAPLHCAQTPYGCCQDNITAARGVGLAGCPSACQCNPHGSYGGTCDPATGQCSCRPGVGGLRCDRCEPGFWNFRGIVTDGRSGCTPCSCDPQGAVRDDCEQMTGLCSCKPGVAGPKCGQCPDGRALGPAGCEADASAPATCAEMRCEFGARCVEESGSAHCVCPMLTCPEANATKVCGSDGVTYGNECQLKTIACRQGLQISIQSLGPCQEAVAPSTHPTSASVTVTTPGLLLSQALPAPPGALPLAPSSTAHSQTTPPPSSRPRTTASVPRTTVWPVLTVPPTAPSPAPSLVASAFGESGSTDGSSDEELSGDQEASGGGSGGLEPLEGSSVATPGPPVERASCYNPCHGAAPCRVLPEGGAQCECPLGREGTFCQTASGQDGSGPFLADFNGFSHLELRGLHTIARDLGEKMALEAVFLARGPSGLLLYNGQKTDGKGDFVSLALRDRRLEFRYDLGKGAAVIRSREPVTLGAWTRVSLERNGRKGALRVGDGPRVLGESPKSRKVPHTVLNLKEPLYVGGAPDFSKLARAAAVSSGFDGAIQLVSLGGRQLLTPEHVLRQVDVTSFAGHPCTRASGHPCLNGASCVPREAAYVCLCPGGFSGPHCEKGLVEKSAGDVDTLAFDGRTFVEYLNAVTESEKALQSNHFELSLRTEATQGLVLWSGKATERADYVALAIVDGHLQLSYNLGSQPVVLRSTVPVNTNRWLRVVAHREQREGSLQVGNEAPVTGSSPLGATQLDTDGALWLGGLPELPVGPALPKAYGTGFVGCLRDVVVGRHPLHLLEDAVTKPELRPCPTP

SEQ ID NO: 1181 - DNA, 893 bp, Homo sapiens
  CDS (37)..(864)
ccggcgcggcccgcgcgctcttccgccgcctctcgcatgcgccatggccggccggtcccacccgggcccgctgcggggcggccgctgctgcctctccttgtggtggccgcgtgcgtcctgcccggagccggcgggacatgcccggagcgcgcgctggagcggcgcgaggaggaggcgaacgtggtgctcaccgggacggtggaggagatcctcaacgtggacccggtgcagcacacgtactcctgcaaggttcgggtctggcggtacttgaagggcaaagacctggtggcccgggagagcctgctggacggcggcaacaaggtggtgatcagcggctttggagaccccctcatctgtgacaaccaggtgtccactggggacaccaggatcttctttgtgaaccctgcacccccatacctgtggccagcccacaagaacgagctggtgctctggagtggcaaggccacggagcgggcagactatgtggcactggccattgtggacgggcacctgcaactgagctacaacctgggctcccagcccgtggtgctgcgttccaccgtgcccgtcaacaccaaccgctggttgcgggtcgtggcacatagggagcagagggaaggttccctgcaggtgggcaatgaggcccctgtgaccggctcctccccgctgggcgccacgcagctggacactgatggagccctgtggcttgggggcctgccggagctgcccgtgggcccagcactgcccaaggcctacggcacaggctttgtgggctgcttgcgggatgtggtggtgggccggcacccgctgcacctgctggaggacgccgtcaccaagccagagctgcggccctgccccaccccatgagctggcaccagagccccgcgcccgct

SEQ ID NO: 1182 - protein, 276 aa, Homo sapiens
MRHGRPVPPGPAAGRPLLPLLVVAACVLPGAGGTCPERALERREEEANVVLTGTVEEILNVDPVQHTYSCKVRVWRYLKGKDLVARESLLDGGNKVVISGFGDPLICDNQVSTGDTRIFFVNPAPPYLWPAHKNELVLWSGKATERADYVALAIVDGHLQLSYNLGSQPVVLRSTVPVNTNRWLRVVAHREQREGSLQVGNEAPVTGSSPLGATQLDTDGALWLGGLPELPVGPALPKAYGTGFVGCLRDVVVGRHPLHLLEDAVTKPELRPCPTP

SEQ ID NO: 1183 - DNA, 1931 bp, Homo sapiens
  CDS (37)..(1902)
ccggcgcggcccgcgcgctcttccgccgcctctcgcatgcgccatggccggccggtcccacccgggcccgctgcggggcggccgctgctgcctctccttgtggtggccgcgtgcgtcctgcccggagccggcgggacatgcccggagcgcgcgctggagcggcgcgaggaggaggcgaacgtggtgctcaccgggacggtggaggagatcctcaacgtggacccggtgcagcacacgtactcctgcaaggttcgggtctggcggtacttgaagggcaaagacctggtggcccgggagagcctgctggacggcggcaacaaggtggtgatcagcggctttggagaccccctcatctgtgacaaccaggtgtccactggggacaccaggatcttctttgtgaaccctgcacccccatacctgtggccagcccacaagaacgagctgatgctcaactccagcctcatgcggatcaccctgcggaacctggaggaggtggagttctgtgtggaagataaacccgggacccacttcactccagtgcctccgacgcctcctgatgcgtgccggggaatgctgtgcggcttcggcgccgtgtgcgagcccaacgcggaggggccgggccgggcgtcctgcgtctgcaagaagagcccgtgccccagcgtggtggcgcctgtgtgtgggtcggacgcctccacctacagcaacgaatgcgagctgcagcgggcgcagtgcagccagcagcgccgcatccgcctgctcagccgcgggccgtgcggctcgcgggacccctgctccaacgtgacctgcagcttcggcagcacctgtgcgcgctcggccgacgggctgacggcctcgtgcctgtgccccgcgacctgccgtggcgcccccgaggggaccgtctgcggcagcgacggcgccgactaccccggcgagtgccagctcctgcgccgcgcctgcgcccgccaggagaatgtcttcaagaagttcgacggcccttgtgacccctgtcagggcgccctccctgacccgagccgcagctgccgtgtgaacccgcgcacgcggcgccctgagatgctcctacggcccgagagctgccctgcccggcaggcgccagtgtgtggggacgacggagtcacctacgaaaacgactgtgtcatgggccgatcgggggccgcccggggtctcctcctgcagaaagtgcgctccggccagtgccagggtcgagaccagtgcccggagccctgccggttcaatgccgtgtgcctgtcccgccgtggccgtccccgctgctcctgcgaccgcgtcacctgtgacggggcctacaggcccgtgtgtgcccaggacgggcgcacgtatgacagtgattgctggcggcagcaggctgagtgccggcagcagcgtgccatccccagcaagcaccagggcccgtgtgaccaggccccgtccccatgcctcggggtgcagtgtgcatttggggcgacgtgtgctgtgaagaacgggcaggcagcgtgtgaatgcctgcaggcgtgctcgagcctctacgatcctgtgtgcggcagcgacggcgtcacatacggcagcgcgtgcgagctggaggccacggcctgtaccctcgggcgggagatccaggtggcgcgcaaaggaccctgtgaccgctgcgggcagtgccgctttggagccctgcctgtgaccggctcctccccgctgggcgccacgcagctggacactgatggagccctgtggcttgggggcctgccggagctgcccgtgggcccagcactgcccaaggcctacggcacaggctttgtgggctgcttgcgggatgtggtggtgggccggcacccgctgcacctgctggaggacgccgtcaccaagccagagctgcggccctgccccaccccatgagctggcaccagagccccgcgcccgct

SEQ ID NO: 1184 - protein, 622 aa, Homo sapiens
MRHGRPVPPGPAAGRPLLPLLVVAACVLPGAGGTCPERALERREEEANVVLTGTVEEILNVDPVQHTYSCKVRVWRYLKGKDLVARESLLDGGNKVVISGFGDPLICDNQVSTGDTRIFFVNPAPPYLWPAHKNELMLNSSLMRITLRNLEEVEFCVEDKPGTHFTPVPPTPPDACRGMLCGFGAVCEPNAEGPGRASCVCKKSPCPSVVAPVCGSDASTYSNECELQRAQCSQQRRIRLLSRGPCGSRDPCSNVTCSFGSTCARSADGLTASCLCPATCRGAPEGTVCGSDGADYPGECQLLRRACARQENVFKKFDGPCDPCQGALPDPSRSCRVNPRTRRPEMLLRPESCPARQAPVCGDDGVTYENDCVMGRSGAARGLLLQKVRSGQCQGRDQCPEPCRFNAVCLSRRGRPRCSCDRVTCDGAYRPVCAQDGRTYDSDCWRQQAECRQQRAIPSKHQGPCDQAPSPCLGVQCAFGATCAVKNGQAACECLQACSSLYDPVCGSDGVTYGSACELEATACTLGREIQVARKGPCDRCGQCRFGALPVTGSSPLGATQLDTDGALWLGGLPELPVGPALPKAYGTGFVGCLRDVVVGRHPLHLLEDAVTKPELRPCPTP

SEQ ID NO: 1185 - DNA, 4697 bp, Homo sapiens
  CDS (37)..(4668)
ccggcgcggcccgcgcgctcttccgccgcctctcgcatgcgccatggccggccggtcccacccgggcccgctgcggggcggccgctgctgcctctccttgtggtggccgcgtgcgtcctgcccggagccggcgggacatgcccggagcgcgcgctggagcggcgcgaggaggaggcgaacgtggtgctcaccgggacggtggaggagatcctcaacgtggacccggtgcagcacacgtactcctgcaaggttcgggtctggcggtacttgaagggcaaagacctggtggcccgggagagcctgctggacggcggcaacaaggtggtgatcagcggctttggagaccccctcatctgtgacaaccaggtgtccactggggacaccaggatcttctttgtgaaccctgcacccccatacctgtggccagcccacaagaacgagctgatgctcaactccagcctcatgcggatcaccctgcggaacctggaggaggtggagttctgtgtggaagataaacccgggacccacttcactccagtgcctccgacgcctcctgatgcgtgccggggaatgctgtgcggcttcggcgccgtgtgcgagcccaacgcggaggggccgggccgggcgtcctgcgtctgcaagaagagcccgtgccccagcgtggtggcgcctgtgtgtgggtcggacgcctccacctacagcaacgaatgcgagctgcagcgggcgcagtgcagccagcagcgccgcatccgcctgctcagccgcgggccgtgcggctcgcgggacccctgctccaacgtgacctgcagcttcggcagcacctgtgcgcgctcggccgacgggctgacggcctcgtgcctgtgccccgcgacctgccgtggcgcccccgaggggaccgtctgcggcagcgacggcgccgactaccccggcgagtgccagctcctgcgccgcgcctgcgcccgccaggagaatgtcttcaagaagttcgacggcccttgtgacccctgtcagggcgccctccctgacccgagccgcagctgccgtgtgaacccgcgcacgcggcgccctgagatgctcctacggcccgagagctgccctgcccggcaggcgccagtgtgtggggacgacggagtcacctacgaaaacgactgtgtcatgggccgatcgggggccgcccggggtctcctcctgcagaaagtgcgctccggccagtgccagggtcgagaccagtgcccggagccctgccggttcaatgccgtgtgcctgtcccgccgtggccgtccccgctgctcctgcgaccgcgtcacctgtgacggggcctacaggcccgtgtgtgcccaggacgggcgcacgtatgacagtgattgctggcggcagcaggctgagtgccggcagcagcgtgccatccccagcaagcaccagggcccgtgtgaccaggccccgtccccatgcctcggggtgcagtgtgcatttggggcgacgtgtgctgtgaagaacgggcaggcagcgtgtgaatgcctgcaggcgtgctcgagcctctacgatcctgtgtgcggcagcgacggcgtcacatacggcagcgcgtgcgagctggaggccacggcctgtaccctcgggcgggagatccaggtggcgcgcaaaggaccctgtgaccgctgcgggcagtgccgctttggagccctgtgcgaggccgagaccgggcgctgcgtgtgcccctctgaatgcgtggctttggcccagcccgtgtgtggctccgacgggcacacgtaccccagcgagtgcatgctgcacgtgcacgcctgcacacaccagatcagcctgcacgtggcctcagctggaccctgtgagacctgtggagatgccgtgtgtgcttttggggctgtgtgctccgcagggcagtgtgtgtgtccccggtgtgagcaccccccgcccggccccgtgtgtggcagcgacggtgtcacctacggcagtgcctgcgagctacgggaagccgcctgcctccagcagacacagatcgaggaggcccgggcagggccgtgcgagcaggccgagtgcggttccggaggctctggctctggggaggacggtgactgtgagcaggagctgtgccggcagcgcggtggcatctgggacgaggactcggaggacgggccgtgtgtctgtgacttcagctgccagagtgtcccaggcagcccggtgtgcggctcagatggggtcacctacagcaccgagtgtgagctgaagaaggccaggtgtgagtcacagcgagggctctacgtagcggcccagggagcctgccgaggccccgccttcgccccgctgccgcctgtggcccccttacactgtgcccagacgccctacggctgctgccaggacaatatcaccgcagcccggggcgtgggcctggctggctgccccagtgcctgccagtgcaacccccatggctcttacggcggcacctgtgacccagccacaggccagtgctcctgccgcccaggtgtggggggcctcaggtgtgaccgctgtgagcctggcttctggaactttcgaggcatcgtcaccgatggccggagtggctgtacaccctgcagctgtgatccccaaggcgccgtgcgggatgactgtgagcagatgacggggctgtgctcgtgtaagcccggggtggctggacccaagtgtgggcagtgtccagacggccgtgccctgggccccgcgggctgtgaagctgacgcttctgcgcctgcgacctgtgcggagatgcgctgtgagttcggtgcgcggtgcgtggaggagtctggctcagcccactgtgtctgcccgatgctcacctgtccagaggccaacgctaccaaggtctgtgggtcagatggagtcacatacggcaacgagtgtcagctgaagaccatcgcctgccgccagggcctgcaaatctctatccagagcctgggcccgtgccaggaggctgttgctcccagcactcacccgacatctgcctccgtgactgtgaccaccccagggctcctcctgagccaggcactgccggccccccccggcgccctccccctggctcccagcagtaccgcacacagccagaccacccctccgccctcatcgcgacctcggaccactgccagcgtccccaggaccaccgtgtggcccgtgctgacggtgccccccacggcaccctcccctgcacccagcctggtggcgtccgcctttggtgaatctggcagcactgatggaagcagcgatgaggaactgagcggggaccaggaggccagtgggggtggctctggggggctcgagcccttggagggcagcagcgtggccacccctgggccacctgtcgagagggcttcctgctacaactccgcgttgggctgctgctctgatgggaagacgccctcgctggacgcagagggctccaactgccccgccaccaaggtgttccagggcgtcctggagctggagggcgtcgagggccaggagctgttctacacgcccgagatggctgaccccaagtcagaactgttcggggagacagccaggagcattgagagcaccctggacgacctcttccggaattcagacgtcaagaaggatttccggagtgtccgcttgcgggacctggggcccggcaaatccgtccgcgccattgtggatgtgcactttgaccccaccacagccttcagggcacccgacgtggcccgggccctgctccggcagatccaggtgtccaggcgccggtccttgggggtgaggcggccgctgcaggagcacgtgcgatttatggactttgactggtttcctgcgtttatcacgggggccacgtcaggagccattgctgcgggagccacggccagagccaccactgcatcgcgcctgccgtcctctgctgtgacccctcgggccccgcaccccagtcacacaagccagcccgttgccaagaccacggcagcccccaccacacgtcggccccccaccactgcccccagccgtgtgcccggacgtcggcccccggcctcctgcgtcccgagggaggctgcctatgtgtgcctgtgtcccgggggattctcaggaccgcactgcgagaaggggctggtggagaagtcagcgggggacgtggataccttggcctttgacgggcggacctttgtcgagtacctcaacgctgtgaccgagagcgagaaggcactgcagagcaaccactttgaactgagcctgcgcactgaggccacgcaggggctggtgctctggagtggcaaggccacggagcgggcagactatgtggcactggccattgtggacgggcacctgcaactgagctacaacctgggctcccagcccgtggtgctgcgttccaccgtgcccgtcaacaccaaccgctggttgcgggtcgtggcacatagggagcagagggaaggttccctgcaggtgggcaatgaggcccctgtgaccggctcctccccgctgggcgccacgcagctggacactgatggagccctgtggcttgggggcctgccggagctgcccgtgggcccagcactgcccaaggcctacggcacaggctttgtgggctgcttgcgggatgtggtggtgggccggcacccgctgcacctgctggaggacgccgtcaccaagccagagctgcggccctgccccaccccatgagctggcaccagagccccgcgcccgct

SEQ ID NO: 1186 - protein, 1544 aa, Homo sapiens
MRHGRPVPPGPAAGRPLLPLLVVAACVLPGAGGTCPERALERREEEANVVLTGTVEEILNVDPVQHTYSCKVRVWRYLKGKDLVARESLLDGGNKVVISGFGDPLICDNQVSTGDTRIFFVNPAPPYLWPAHKNELMLNSSLMRITLRNLEEVEFCVEDKPGTHFTPVPPTPPDACRGMLCGFGAVCEPNAEGPGRASCVCKKSPCPSVVAPVCGSDASTYSNECELQRAQCSQQRRIRLLSRGPCGSRDPCSNVTCSFGSTCARSADGLTASCLCPATCRGAPEGTVCGSDGADYPGECQLLRRACARQENVFKKFDGPCDPCQGALPDPSRSCRVNPRTRRPEMLLRPESCPARQAPVCGDDGVTYENDCVMGRSGAARGLLLQKVRSGQCQGRDQCPEPCRFNAVCLSRRGRPRCSCDRVTCDGAYRPVCAQDGRTYDSDCWRQQAECRQQRAIPSKHQGPCDQAPSPCLGVQCAFGATCAVKNGQAACECLQACSSLYDPVCGSDGVTYGSACELEATACTLGREIQVARKGPCDRCGQCRFGALCEAETGRCVCPSECVALAQPVCGSDGHTYPSECMLHVHACTHQISLHVASAGPCETCGDAVCAFGAVCSAGQCVCPRCEHPPPGPVCGSDGVTYGSACELREAACLQQTQIEEARAGPCEQAECGSGGSGSGEDGDCEQELCRQRGGIWDEDSEDGPCVCDFSCQSVPGSPVCGSDGVTYSTECELKKARCESQRGLYVAAQGACRGPAFAPLPPVAPLHCAQTPYGCCQDNITAARGVGLAGCPSACQCNPHGSYGGTCDPATGQCSCRPGVGGLRCDRCEPGFWNFRGIVTDGRSGCTPCSCDPQGAVRDDCEQMTGLCSCKPGVAGPKCGQCPDGRALGPAGCEADASAPATCAEMRCEFGARCVEESGSAHCVCPMLTCPEANATKVCGSDGVTYGNECQLKTIACRQGLQISIQSLGPCQEAVAPSTHPTSASVTVTTPGLLLSQALPAPPGALPLAPSSTAHSQTTPPPSSRPRTTASVPRTTVWPVLTVPPTAPSPAPSLVASAFGESGSTDGSSDEELSGDQEASGGGSGGLEPLEGSSVATPGPPVERASCYNSALGCCSDGKTPSLDAEGSNCPATKVFQGVLELEGVEGQELFYTPEMADPKSELFGETARSIESTLDDLFRNSDVKKDFRSVRLRDLGPGKSVRAIVDVHFDPTTAFRAPDVARALLRQIQVSRRRSLGVRRPLQEHVRFMDFDWFPAFITGATSGAIAAGATARATTASRLPSSAVTPRAPHPSHTSQPVAKTTAAPTTRRPPTTAPSRVPGRRPPASCVPREAAYVCLCPGGFSGPHCEKGLVEKSAGDVDTLAFDGRTFVEYLNAVTESEKALQSNHFELSLRTEATQGLVLWSGKATERADYVALAIVDGHLQLSYNLGSQPVVLRSTVPVNTNRWLRVVAHREQREGSLQVGNEAPVTGSSPLGATQLDTDGALWLGGLPELPVGPALPKAYGTGFVGCLRDVVVGRHPLHLLEDAVTKPELRPCPTP

SEQ ID NO: 1187 - DNA, 6494 bp, Homo sapiens
  CDS (37)..(6465)
ccggcgcggcccgcgcgctcttccgccgcctctcgcatgcgccatggccggccggtcccacccgggcccgctgcggggcggccgctgctgcctctccttgtggtggccgcgtgcgtcctgcccggagccggcgggacatgcccggagcgcgcgctggagcggcgcgaggaggaggcgaacgtggtgctcaccgggacggtggaggagatcctcaacgtggacccggtgcagcacacgtactcctgcaaggttcgggtctggcggtacttgaagggcaaagacctggtggcccgggagagcctgctggacggcggcaacaaggtggtgatcagcggctttggagaccccctcatctgtgacaaccaggtgtccactggggacaccaggatcttctttgtgaaccctgcacccccatacctgtggccagcccacaagaacgagctgatgctcaactccagcctcatgcggatcaccctgcggaacctggaggaggtggagttctgtgtggaagataaacccgggacccacttcactccagtgcctccgacgcctcctgatgcgtgccggggaatgctgtgcggcttcggcgccgtgtgcgagcccaacgcggaggggccgggccgggcgtcctgcgtctgcaagaagagcccgtgccccagcgtggtggcgcctgtgtgtgggtcggacgcctccacctacagcaacgaatgcgagctgcagcgggcgcagtgcagccagcagcgccgcatccgcctgctcagccgcgggccgtgcggctcgcgggacccctgctccaacgtgacctgcagcttcggcagcacctgtgcgcgctcggccgacgggctgacggcctcgtgcctgtgccccgcgacctgccgtggcgcccccgaggggaccgtctgcggcagcgacggcgccgactaccccggcgagtgccagctcctgcgccgcgcctgcgcccgccaggagaatgtcttcaagaagttcgacggcccttgtgacccctgtcagggcgccctccctgacccgagccgcagctgccgtgtgaacccgcgcacgcggcgccctgagatgctcctacggcccgagagctgccctgcccggcaggcgccagtgtgtggggacgacggagtcacctacgaaaacgactgtgtcatgggccgatcgggggccgcccggggtctcctcctgcagaaagtgcgctccggccagtgccagggtcgagaccagtgcccggagccctgccggttcaatgccgtgtgcctgtcccgccgtggccgtccccgctgctcctgcgaccgcgtcacctgtgacggggcctacaggcccgtgtgtgcccaggacgggcgcacgtatgacagtgattgctggcggcagcaggctgagtgccggcagcagcgtgccatccccagcaagcaccagggcccgtgtgaccaggccccgtccccatgcctcggggtgcagtgtgcatttggggcgacgtgtgctgtgaagaacgggcaggcagcgtgtgaatgcctgcaggcgtgctcgagcctctacgatcctgtgtgcggcagcgacggcgtcacatacggcagcgcgtgcgagctggaggccacggcctgtaccctcgggcgggagatccaggtggcgcgcaaaggaccctgtgaccgctgcgggcagtgccgctttggagccctgtgcgaggccgagaccgggcgctgcgtgtgcccctctgaatgcgtggctttggcccagcccgtgtgtggctccgacgggcacacgtaccccagcgagtgcatgctgcacgtgcacgcctgcacacaccagatcagcctgcacgtggcctcagctggaccctgtgagacctgtggagatgccgtgtgtgcttttggggctgtgtgctccgcagggcagtgtgtgtgtccccggtgtgagcaccccccgcccggccccgtgtgtggcagcgacggtgtcacctacggcagtgcctgcgagctacgggaagccgcctgcctccagcagacacagatcgaggaggcccgggcagggccgtgcgagcaggccgagtgcggttccggaggctctggctctggggaggacggtgactgtgagcaggagctgtgccggcagcgcggtggcatctgggacgaggactcggaggacgggccgtgtgtctgtgacttcagctgccagagtgtcccaggcagcccggtgtgcggctcagatggggtcacctacagcaccgagtgtgagctgaagaaggccaggtgtgagtcacagcgagggctctacgtagcggcccagggagcctgccgaggccccgccttcgccccgctgccgcctgtggcccccttacactgtgcccagacgccctacggctgctgccaggacaatatcaccgcagcccggggcgtgggcctggctggctgccccagtgcctgccagtgcaacccccatggctcttacggcggcacctgtgacccagccacaggccagtgctcctgccgcccaggtgtggggggcctcaggtgtgaccgctgtgagcctggcttctggaactttcgaggcatcgtcaccgatggccggagtggctgtacaccctgcagctgtgatccccaaggcgccgtgcgggatgactgtgagcagatgacggggctgtgctcgtgtaagcccggggtggctggacccaagtgtgggcagtgtccagacggccgtgccctgggccccgcgggctgtgaagctgacgcttctgcgcctgcgacctgtgcggagatgcgctgtgagttcggtgcgcggtgcgtggaggagtctggctcagcccactgtgtctgcccgatgctcacctgtccagaggccaacgctaccaaggtctgtgggtcagatggagtcacatacggcaacgagtgtcagctgaagaccatcgcctgccgccagggcctgcaaatctctatccagagcctgggcccgtgccaggaggctgttgctcccagcactcacccgacatctgcctccgtgactgtgaccaccccagggctcctcctgagccaggcactgccggccccccccggcgccctccccctggctcccagcagtaccgcacacagccagaccacccctccgccctcatcgcgacctcggaccactgccagcgtccccaggaccaccgtgtggcccgtgctgacggtgccccccacggcaccctcccctgcacccagcctggtggcgtccgcctttggtgaatctggcagcactgatggaagcagcgatgaggaactgagcggggaccaggaggccagtgggggtggctctggggggctcgagcccttggagggcagcagcgtggccacccctgggccacctgtcgagagggcttcctgctacaactccgcgttgggctgctgctctgatgggaagacgccctcgctggacgcagagggctccaactgccccgccaccaaggtgttccagggcgtcctggagctggagggcgtcgagggccaggagctgttctacacgcccgagatggctgaccccaagtcagaactgttcggggagacagccaggagcattgagagcaccctggacgacctcttccggaattcagacgtcaagaaggatttccggagtgtccgcttgcgggacctggggcccggcaaatccgtccgcgccattgtggatgtgcactttgaccccaccacagccttcagggcacccgacgtggcccgggccctgctccggcagatccaggtgtccaggcgccggtccttgggggtgaggcggccgctgcaggagcacgtgcgatttatggactttgactggtttcctgcgtttatcacgggggccacgtcaggagccattgctgcgggagccacggccagagccaccactgcatcgcgcctgccgtcctctgctgtgacccctcgggccccgcaccccagtcacacaagccagcccgttgccaagaccacggcagcccccaccacacgtcggccccccaccactgcccccagccgtgtgcccggacgtcggcccccggccccccagcagcctccaaagccctgtgactcacagccctgcttccacggggggacctgccaggactgggcattgggcgggggcttcacctgcagctgcccggcaggcaggggaggcgccgtctgtgagaaggtgcttggcgcccctgtgccggccttcgagggccgctccttcctggccttccccaccctccgcgcctaccacacgctgcgcctggcactggaattccgggcgctggagcctcaggggctgctgctgtacaatggcaacgcccggggcaaggacttcctggcattggcgctgctagatggccgcgtgcagctcaggtttgacacaggttcggggccggcggtgctgaccagtgccgtgccggtagagccgggccagtggcaccgcctggagctgtcccggcactggcgccggggcaccctctcggtggatggtgagacccctgttctgggcgagagtcccagtggcaccgacggcctcaacctggacacagacctctttgtgggcggcgtacccgaggaccaggctgccgtggcgctggagcggaccttcgtgggcgccggcctgagggggtgcatccgtttgctggacgtcaacaaccagcgcctggagcttggcattgggccgggggctgccacccgaggctctggcgtgggcgagtgcggggaccacccctgcctgcccaacccctgccatggcggggccccatgccagaacctggaggctggaaggttccattgccagtgcccgcccggccgcgtcggaccaacctgtgccgatgagaagagcccctgccagcccaacccctgccatggggcggcgccctgccgtgtgctgcccgagggtggtgctcagtgcgagtgccccctggggcgtgagggcaccttctgccagacagcctcggggcaggacggctctgggcccttcctggctgacttcaacggcttctcccacctggagctgagaggcctgcacaccattgcacgggacctgggggagaagatggcgctggaggccgtgttcctggcacgaggccccagcggcctcctgctctacaacgggcagaagacggacggcaagggggacttcgtgtcgctggcactgcgggaccgccgcctggagttccgctacgacctgggcaagggggcagcggtcatcaggagcagggagccagtcaccctgggagcctggaccagggtctcactggagcgaaacggccgcaagggtgccctgcgtgtgggcgacggcccccgtgtgttgggggagtccccgaaatcccgcaaggttccgcacaccgtcctcaacctgaaggagccgctctacgtagggggcgctcccgacttcagcaagctggcccgtgctgctgccgtgtcctctggcttcgacggtgccatccagctggtctccctcggaggccgccagctgctgaccccggagcacgtgctgcggcaggtggacgtcacgtcctttgcaggtcacccctgcacccgggcctcaggccacccctgcctcaatggggcctcctgcgtcccgagggaggctgcctatgtgtgcctgtgtcccgggggattctcaggaccgcactgcgagaaggggctggtggagaagtcagcgggggacgtggataccttggcctttgacgggcggacctttgtcgagtacctcaacgctgtgaccgagagcgagaaggcactgcagagcaaccactttgaactgagcctgcgcactgaggccacgcaggggctggtgctctggagtggcaaggccacggagcgggcagactatgtggcactggccattgtggacgggcacctgcaactgagctacaacctgggctcccagcccgtggtgctgcgttccaccgtgcccgtcaacaccaaccgctggttgcgggtcgtggcacatagggagcagagggaaggttccctgcaggtgggcaatgaggcccctgtgaccggctcctccccgctgggcgccacgcagctggacactgatggagccctgtggcttggtgagtgttttggggagactagagagggatgcccaagggtctcagatatccgagggacagactccaccccccagcgcccacccttgagtcagggtgcatgtgagccggcgggctgggctctcttctcccgctgtagcccctgcagttcccagtgctgtggggccgggaggcgggtgcccaggtgtgggccccctgctggtcacctgctcgttggggtgcccatcagcatcactgagtcacagccgggtgactcccactgtctgtgctgcaggggcctgccggagctgcccgtgggcccagcactgcccaaggcctacggcacaggctttgtgggctgcttgcgggatgtggtggtgggccggcacccgctgcacctgctggaggacgccgtcaccaagccagagctgcggccctgccccaccccatgagctggcaccagagccccgcgcccgct

SEQ ID NO: 1188 - protein, 2143 aa, Homo sapiens
MRHGRPVPPGPAAGRPLLPLLVVAACVLPGAGGTCPERALERREEEANVVLTGTVEEILNVDPVQHTYSCKVRVWRYLKGKDLVARESLLDGGNKVVISGFGDPLICDNQVSTGDTRIFFVNPAPPYLWPAHKNELMLNSSLMRITLRNLEEVEFCVEDKPGTHFTPVPPTPPDACRGMLCGFGAVCEPNAEGPGRASCVCKKSPCPSVVAPVCGSDASTYSNECELQRAQCSQQRRIRLLSRGPCGSRDPCSNVTCSFGSTCARSADGLTASCLCPATCRGAPEGTVCGSDGADYPGECQLLRRACARQENVFKKFDGPCDPCQGALPDPSRSCRVNPRTRRPEMLLRPESCPARQAPVCGDDGVTYENDCVMGRSGAARGLLLQKVRSGQCQGRDQCPEPCRFNAVCLSRRGRPRCSCDRVTCDGAYRPVCAQDGRTYDSDCWRQQAECRQQRAIPSKHQGPCDQAPSPCLGVQCAFGATCAVKNGQAACECLQACSSLYDPVCGSDGVTYGSACELEATACTLGREIQVARKGPCDRCGQCRFGALCEAETGRCVCPSECVALAQPVCGSDGHTYPSECMLHVHACTHQISLHVASAGPCETCGDAVCAFGAVCSAGQCVCPRCEHPPPGPVCGSDGVTYGSACELREAACLQQTQIEEARAGPCEQAECGSGGSGSGEDGDCEQELCRQRGGIWDEDSEDGPCVCDFSCQSVPGSPVCGSDGVTYSTECELKKARCESQRGLYVAAQGACRGPAFAPLPPVAPLHCAQTPYGCCQDNITAARGVGLAGCPSACQCNPHGSYGGTCDPATGQCSCRPGVGGLRCDRCEPGFWNFRGIVTDGRSGCTPCSCDPQGAVRDDCEQMTGLCSCKPGVAGPKCGQCPDGRALGPAGCEADASAPATCAEMRCEFGARCVEESGSAHCVCPMLTCPEANATKVCGSDGVTYGNECQLKTIACRQGLQISIQSLGPCQEAVAPSTHPTSASVTVTTPGLLLSQALPAPPGALPLAPSSTAHSQTTPPPSSRPRTTASVPRTTVWPVLTVPPTAPSPAPSLVASAFGESGSTDGSSDEELSGDQEASGGGSGGLEPLEGSSVATPGPPVERASCYNSALGCCSDGKTPSLDAEGSNCPATKVFQGVLELEGVEGQELFYTPEMADPKSELFGETARSIESTLDDLFRNSDVKKDFRSVRLRDLGPGKSVRAIVDVHFDPTTAFRAPDVARALLRQIQVSRRRSLGVRRPLQEHVRFMDFDWFPAFITGATSGAIAAGATARATTASRLPSSAVTPRAPHPSHTSQPVAKTTAAPTTRRPPTTAPSRVPGRRPPAPQQPPKPCDSQPCFHGGTCQDWALGGGFTCSCPAGRGGAVCEKVLGAPVPAFEGRSFLAFPTLRAYHTLRLALEFRALEPQGLLLYNGNARGKDFLALALLDGRVQLRFDTGSGPAVLTSAVPVEPGQWHRLELSRHWRRGTLSVDGETPVLGESPSGTDGLNLDTDLFVGGVPEDQAAVALERTFVGAGLRGCIRLLDVNNQRLELGIGPGAATRGSGVGECGDHPCLPNPCHGGAPCQNLEAGRFHCQCPPGRVGPTCADEKSPCQPNPCHGAAPCRVLPEGGAQCECPLGREGTFCQTASGQDGSGPFLADFNGFSHLELRGLHTIARDLGEKMALEAVFLARGPSGLLLYNGQKTDGKGDFVSLALRDRRLEFRYDLGKGAAVIRSREPVTLGAWTRVSLERNGRKGALRVGDGPRVLGESPKSRKVPHTVLNLKEPLYVGGAPDFSKLARAAAVSSGFDGAIQLVSLGGRQLLTPEHVLRQVDVTSFAGHPCTRASGHPCLNGASCVPREAAYVCLCPGGFSGPHCEKGLVEKSAGDVDTLAFDGRTFVEYLNAVTESEKALQSNHFELSLRTEATQGLVLWSGKATERADYVALAIVDGHLQLSYNLGSQPVVLRSTVPVNTNRWLRVVAHREQREGSLQVGNEAPVTGSSPLGATQLDTDGALWLGECFGETREGCPRVSDIRGTDSTPQRPPLSQGACEPAGWALFSRCSPCSSQCCGAGRRVPRCGPPAGHLLVGVPISITESQPGDSHCLCCRGLPELPVGPALPKAYGTGFVGCLRDVVVGRHPLHLLEDAVTKPELRPCPTP

SEQ ID NO: 1189 - DNA, 5688 bp, Homo sapiens
  CDS (37)..(4734)
ccggcgcggcccgcgcgctcttccgccgcctctcgcatgcgccatggccggccggtcccacccgggcccgctgcggggcggccgctgctgcctctccttgtggtggccgcgtgcgtcctgcccggagccggcgggacatgcccggagcgcgcgctggagcggcgcgaggaggaggcgaacgtggtgctcaccgggacggtggaggagatcctcaacgtggacccggtgcagcacacgtactcctgcaaggttcgggtctggcggtacttgaagggcaaagacctggtggcccgggagagcctgctggacggcggcaacaaggtggtgatcagcggctttggagaccccctcatctgtgacaaccaggtgtccactggggacaccaggatcttctttgtgaaccctgcacccccatacctgtggccagcccacaagaacgagctgatgctcaactccagcctcatgcggatcaccctgcggaacctggaggaggtggagttctgtgtggaagataaacccgggacccacttcactccagtgcctccgacgcctcctgatgcgtgccggggaatgctgtgcggcttcggcgccgtgtgcgagcccaacgcggaggggccgggccgggcgtcctgcgtctgcaagaagagcccgtgccccagcgtggtggcgcctgtgtgtgggtcggacgcctccacctacagcaacgaatgcgagctgcagcgggcgcagtgcagccagcagcgccgcatccgcctgctcagccgcgggccgtgcggctcgcgggacccctgctccaacgtgacctgcagcttcggcagcacctgtgcgcgctcggccgacgggctgacggcctcgtgcctgtgccccgcgacctgccgtggcgcccccgaggggaccgtctgcggcagcgacggcgccgactaccccggcgagtgccagctcctgcgccgcgcctgcgcccgccaggagaatgtcttcaagaagttcgacggcccttgtgacccctgtcagggcgccctccctgacccgagccgcagctgccgtgtgaacccgcgcacgcggcgccctgagatgcgcctacggcccgagagctgccctgcccggcaggcgccagtgtgtggggacgacggagtcacctacgaaaacgactgtgtcatgggccgatcgggggccgcccggggtctcctcctgcagaaagtgcgctccggccagtgccagggtcgagaccagtgcccggagccctgccggttcaatgccgtgtgcctgtcccgccgtggccgtccccgctgctcctgcgaccgcgtcacctgtgacggggcctacaggcccgtgtgtgcccaggacgggcgcacgtatgacagtgattgctggcggcagcaggctgagtgccggcagcagcgtgccatccccagcaagcaccagggcccgtgtgaccaggccccgtccccatgcctcggggtgcagtgtgcatttggggcgacgtgtgctgtgaagaacgggcaggcagcgtgtgaatgcctgcaggcgtgctcgagcctctacgatcctgtgtgcggcagcgacggcgtcacatacggcagcgcgtgcgagctggaggccacggcctgtaccctcgggcgggagatccaggtggcgcgcaaaggaccctgtgaccgctgcgggcagtgccgctttggagccctgtgcgaggccgagaccgggcgctgcgtgtgcccctctgaatgcgtggctttggcccagcccgtgtgtggctccgacgggcacacgtaccccagcgagtgcatgctgcacgtgcacgcctgcacacaccagatcagcctgcacgtggcctcagctggaccctgcgagacctgtggagatgccgtgtgtgcttttggggctgtgtgctccgcagggcagtgtgtgtgtccccggtgtgagcaccccccgcccggccccgtgtgtggcagcgacggtgtcacctacggcagtgcctgcgagctacgggaagccgcctgcctccagcagacacagatcgaggaggcccgggcagggccgtgcgagcaggccgagtgcggttccggaggctctggctctggggaggacggtgactgtgagcaggagctgtgccggcagcgcggtggcatctgggacgaggactcggaggacgggccgtgtgtctgtgacttcagctgccagagtgtcccaggcagcccggtgtgcggctcagatggggtcacctacagcaccgagtgtgagctgaagaaggccaggtgtgagtcacagcgagggctctacgtagcggcccagggagcctgccgaggccccaccttcgccccgctgccgcctgtggcccccttacactgtgcccagacgccctacggctgctgccaggacaatatcaccgcagcccggggcgtgggcctggctggctgccccagtgcctgccagtgcaacccccatggctcttacggcggcacctgtgacccagccacaggccagtgctcctgccgcccaggtgtggggggcctcaggtgtgaccgctgtgagcctggcttctggaactttcgaggcatcgtcaccgatggccggagtggctgtacaccctgcagctgtgatccccaaggcgccgtgcgggatgactgtgagcagatgacggggctgtgctcgtgtaagcccggggtggctggacccaagtgtgggcagtgtccagacggccgtgccctgggccccgcgggctgtgaagctgacgcttctgcgcctgcgacctgtgcggagatgcgctgtgagttcggtgcgcggtgcgtggaggagtctggctcagcccactgtgtctgcccgatgctcacctgtccagaggccaacgctaccaaggtctgtgggtcagatggagtcacatacggcaacgagtgtcagctgaagaccatcgcctgccgacggtgtcacctacgccagggcctgcaaatctctatccagagcctgggcccgtgccaggaggctgttgctcccagcactcacccgacatctgcctccgtgactgtgaccaccccagggctcctcctgagccaggcactgccggccccccccggcgccctccccctggctcccagcagtaccgcacacagccagaccacccctccgccctcatcgcgacctcggaccactgccagcgtccccaggaccaccgtgtggcccgtgctgacggtgccccccacggcaccctcccctgcacccagcctggtggcgtccgcctttggtgaatctggcagcactgatggaagcagcgatgaggaactgagcggggaccaggaggccagtgggggtggctctggggggcccgagcccttggagggcagcagcgtggccacccctgggccacctgtcgagagggcttcctgctacaacccctgccatggggcggcgccctgccgtgtgctgcccgagggtggtgctcagtgcgagtgccccctggggcgtgagggcaccttctgccagacagcctcggggcaggacggctctgggcccttcctggctgacttcaacggcttctcccacctggagctgagaggcctgcacacctttgcacgggacctgggggagaagatggcgctggaggtcgtgttcctggcacgaggccccagcggcctcctgctctacaacgggcagaagacggacggcaagggggacttcgtgtcgctggcactgcgggaccgccgcctggagttccgctacgacctgggcaagggggcagcggtcatcaggagcagggagccagtcaccctgggagcctggaccagggtctcactggagcgaaacggccgcaagggtgccctgcgtgtgggcgacggcccccgtgtgttgggggagtccccggttccgcacaccgtcctcaacctgaaggagccgctctacgtagggggcgctcccgacttcagcaagctggcccgtgctgctgccgtgtcctctggcttcgacggtgccatccagctggtctccctcggaggccgccagctgctgaccccggagcacgtgctgcggcaggtggacgtcacgtcctttgcaggtcacccctgcacccgggcctcaggccacccctgcctcaatggggcctcctgcgtcccgagggaggctgcctatgtgtgcctgtgtcccgggggattctcaggaccgcactgcgagaaggggctggtggagaagtcagcgggggacgtggataccttggcctttgacgggcggacctttgtcgagtacctcaacgctgtgaccgagagcgagaaggcactgcagagcaaccactttgaactgagcctgcgcactgaggccacgcaggggctggtgctctggagtggcaaggccacggagcgggcagactatgtggcactggccattgtggacgggcacctgcaactgagctacaacctgggctcccagcccgtggtgctgcgttccaccgtgcccgtcaacaccaaccgctggttgcgggtcgtggcacatagggagcagagggaaggttccctgcaggtgggcaatgaggcccctgtgaccggctcctccccgctgggcgccacgcagctggacactgatggagccctgtggcttgggggcctgccggagctgcccgtgggcccagcactgcccaaggcctacggcacaggctttgtgggctgcttgcgggatgtggtggtgggccggcacccgctgcacctgctggaggacgccgtcaccaagccagagctgcggccctgccccaccccatgagctggcaccagagccccgcgcccgctgtaattattttctatttttgtaaacttgttgctttttgatatgattttcttgcctgagtgttggccggagggactgctggcccggcctcccttccgtccaggcagccgtgctgcagacagacctagtgctgagggatggacaggcgaggtggcagcgtggagggctcggcgtggatggcagcctcaggacacacacccctgcctcaaggtgctgagcccccgccttgcactgcgcctgccccacggtgtccccgccgggaagcagccccggctcctgaatcaccctcgctccgtcaggcgggactcgtgtcccaaaaaggaaggggctgctgaggtctgatggggcccttcctccgggtgaccccacagggcctttccaagcccctatttgagctgctccttcctgtgtgtgctctggaccctgcctcggcctcctgcgccaatactgtgacttccaaacaatgttactgctgggcacagctctgcgttgctcccgtgctgcctgcgccagccccaggctgctgaggagcagaggccagaccagggccgatctgggtgtcctgaccctcagctggccctgcccagccaccctggacatgaccgtatccctctgccacaccccaggccctgcgaggggctatcgagaggagctcactgtgggatggggttgacctctgccgcctgcctgggtatctgggcctggccatggctgtgttcttcatgtgttgattttatttgacccctggagtggtgggtctcatctttcccatctcgcctgagagcggctgagggctgcctcactgcaaatcctccccacagcgtcagtgaaagtcgtccttgtctcagaatgaccaggggccagccagtgtctgaccaaggtcaaggggcaggtgcagaggtggcagggatggctccgaagccagaa

SEQ ID NO: 1190 - protein, 1566 aa, Homo sapiens
MRHGRPVPPGPAAGRPLLPLLVVAACVLPGAGGTCPERALERREEEANVVLTGTVEEILNVDPVQHTYSCKVRVWRYLKGKDLVARESLLDGGNKVVISGFGDPLICDNQVSTGDTRIFFVNPAPPYLWPAHKNELMLNSSLMRITLRNLEEVEFCVEDKPGTHFTPVPPTPPDACRGMLCGFGAVCEPNAEGPGRASCVCKKSPCPSVVAPVCGSDASTYSNECELQRAQCSQQRRIRLLSRGPCGSRDPCSNVTCSFGSTCARSADGLTASCLCPATCRGAPEGTVCGSDGADYPGECQLLRRACARQENVFKKFDGPCDPCQGALPDPSRSCRVNPRTRRPEMRLRPESCPARQAPVCGDDGVTYENDCVMGRSGAARGLLLQKVRSGQCQGRDQCPEPCRFNAVCLSRRGRPRCSCDRVTCDGAYRPVCAQDGRTYDSDCWRQQAECRQQRAIPSKHQGPCDQAPSPCLGVQCAFGATCAVKNGQAACECLQACSSLYDPVCGSDGVTYGSACELEATACTLGREIQVARKGPCDRCGQCRFGALCEAETGRCVCPSECVALAQPVCGSDGHTYPSECMLHVHACTHQISLHVASAGPCETCGDAVCAFGAVCSAGQCVCPRCEHPPPGPVCGSDGVTYGSACELREAACLQQTQIEEARAGPCEQAECGSGGSGSGEDGDCEQELCRQRGGIWDEDSEDGPCVCDFSCQSVPGSPVCGSDGVTYSTECELKKARCESQRGLYVAAQGACRGPTFAPLPPVAPLHCAQTPYGCCQDNITAARGVGLAGCPSACQCNPHGSYGGTCDPATGQCSCRPGVGGLRCDRCEPGFWNFRGIVTDGRSGCTPCSCDPQGAVRDDCEQMTGLCSCKPGVAGPKCGQCPDGRALGPAGCEADASAPATCAEMRCEFGARCVEESGSAHCVCPMLTCPEANATKVCGSDGVTYGNECQLKTIACRRCHLRQGLQISIQSLGPCQEAVAPSTHPTSASVTVTTPGLLLSQALPAPPGALPLAPSSTAHSQTTPPPSSRPRTTASVPRTTVWPVLTVPPTAPSPAPSLVASAFGESGSTDGSSDEELSGDQEASGGGSGGPEPLEGSSVATPGPPVERASCYNPCHGAAPCRVLPEGGAQCECPLGREGTFCQTASGQDGSGPFLADFNGFSHLELRGLHTFARDLGEKMALEVVFLARGPSGLLLYNGQKTDGKGDFVSLALRDRRLEFRYDLGKGAAVIRSREPVTLGAWTRVSLERNGRKGALRVGDGPRVLGESPVPHTVLNLKEPLYVGGAPDFSKLARAAAVSSGFDGAIQLVSLGGRQLLTPEHVLRQVDVTSFAGHPCTRASGHPCLNGASCVPREAAYVCLCPGGFSGPHCEKGLVEKSAGDVDTLAFDGRTFVEYLNAVTESEKALQSNHFELSLRTEATQGLVLWSGKATERADYVALAIVDGHLQLSYNLGSQPVVLRSTVPVNTNRWLRVVAHREQREGSLQVGNEAPVTGSSPLGATQLDTDGALWLGGLPELPVGPALPKAYGTGFVGCLRDVVVGRHPLHLLEDAVTKPELRPCPTP

SEQ ID NO: 1191 - DNA, 789 bp, Homo sapiens
  CDS (1)..(786)
atgccttgggtatgccgccccactggctggacaaagcggcgcgtggatgtgcctgtggggccttgccctgggcatcgctgctgctgccagcgcccttcacccatgcttcagcatggtgcccatacgcacttcctgcaggagtctgctggatacctgcagctggagcacaggagagatttcagctcttctgggagtaggaagctctcctttgacactcgttccttagtgtgctttctggaagaccatgggtttgctactcagcaagcagaaatcattgtgtctgcattggtccaggtactggaggccaacgtggacatcgtctacaaagatatggccaccaagatgaagcaggagatcgctcttcagcaaataatgtctcagactgtgaatgtgaaaaacgatatgattactttggagaagagtgaattttcagccctcagagcagaacgtgagaaaataaaactcaaactacatcagttaaaacaagtaatggatgaagtgattaaagtccgaacagatactaaattagacttcaacctagaaaagagcagagtaaaagaattgtattcgttgaatgaaaggaagctgctggaattgagaacagaaatagtgacattgcatgcccagcaagattgggccgtcacccagagagataggaagatagaaactgaggatgctggccccaaaaccatgcttgagtcatacaagcttgataatattaaatatttagcagggtctatatttacgtgcctaacagtagctctgggattttatcacctgtggatctaa

SEQ ID NO: 1192 - protein, 262 aa, Homo sapiens [sequence omitted]

SEQ ID NO: 1193 - DNA, 808 bp, Homo sapiens
  CDS (2)..(808)
caccggatccaccatgccttgggtatgccgccccactggctggacaaagcggcgcgtggatgtgcctgtggggccttgccctgggcatcgctgctgctgccagcgcccttcacccatgcttcagcatggtgcctatactcacttcctgcaggagtctgctggatacctgcagctggagcacaggagagatttcagctcttctgggagtaggaagctctcctttgacactcgttccttagtgtgctttctggaagaccatgggtttgctactcagcaagcagaaatcattgtgtctgcattggtccaggtactggaggccaacgtggacatcgtctacaaagatatggccaccaagatgaagcaggagatcgctcttcagcaaataatgtctcagactgtgaatgtgaaaaacgatatgattactttggagaagagtgaattttcagccctcagagcagaacgtgagaaaataaaactcaaactacatcagttaaaacaagtaatggatgaagtgattaaagtccgaacagatactaaattagacttcaacctagaaaagagcagagtaaaagaattgtattcgttgaatgaaaggaagctgctggaattgagaacagaaatagtgacattgcatgcccagcaagattgggccgtcacccagagagataggaagatagaaactgaggatgctggccccaaaaccatgcttgagtcatacaagcttgataatattaaatatttagcagggtctatatttacgtgcctaacagtagctctgggattttatcacctgtggatcctcgagggc

SEQ ID NO: 1194 - protein, 269 aa, Homo sapiens
TGSTMPWVCRPTGWTKRRVDVPVGPCPGHRCCCQRPSPMLQHGAYTHFLQESAGYLQLEHRRDFSSSGSRKLSFDTRSLVCFLEDHGFATQQAEIIVSALVQVLEANVDIVYKDMATKMKQEIALQQIMSQTVNVKNDMITLEKSEFSALRAEREKIKLKLHQLKQVMDEVIKVRTDTKLDFNLEKSRVKELYSLNERKLLELRTEIVTLHAQQDWAVTQRDRKIETEDAGPKTMLESYKLDNIKYLAGSIFTCLTVALGFYHLWILEG

SEQ ID NO: 1195 - DNA, 789 bp, Homo sapiens; identical to SEQ ID NO: 1191
  CDS (1)..(786)

SEQ ID NO: 1196 - protein, 262 aa, Homo sapiens [sequence omitted]

SEQ ID NO: 1197 - DNA, 285 bp, Homo sapiens
  CDS (31)..(279)
ggatccaccatgccttgggtatgccgccccactggctggacaaagcggcgcgtggatgtgcctgtggggccttgccctgggcatcgctgctgctgccagcgcccttcacccatgcttcagcatggtgcctatactcacttcctgcaggagtctgctggatacctgcagctggagcacaggagagatttcagctcttctgggagtaggaagctctcctttgacactcgttccttagtgtgctttctggaagaccatgggtttgctactcagcaagcagaactcgag

SEQ ID NO: 1198 - protein, 83 aa, Homo sapiens
TGWTKRRVDVPVGPCPGHRCCCQRPSPMLQHGAYTHFLQESAGYLQLEHRRDFSSSGSRKLSFDTRSLVCFLEDHGFATQQAE

SEQ ID NO: 1199 - DNA, 801 bp, Homo sapiens
  CDS (31)..(771)
ggatccaccatgccttgggtatgccgccccactggctggacaaagcggcgcgtggatgtgcctgtggggccttgccctgggcatcgctgctgctgccagcgcccttcacccatgcttcagcatggtgcctatactcacttcctgcaggagtctgctggatacctgcagctggagcacaggagagatttcagctcttctgggagtaggaagctctcctttgacactcgttccttagtgtgctttctggaagaccatgggtttgctactcagcaagcagaaatcattgtgtctgcattggtccaggtactggaggccaacgtggacatcgtctacaaagatatggccaccaagatgaagcaggagatcgctcttcagcaaataatgtctcagactgtgaatgtgaaaaacgatatgattactttggagaagagtgaattttcagccctcagagcagaacgtgagaaaataaaactcaaactacatcagttaaaacaagtaatggatgaagtgattaaagtccgaacagatactaaattagacttcaacctagaaaagagcagagtaaaagaattgtattcgttgaatgaaaggaagctgctggaattgagaacagaaatagtgacattgcatgcccagcaagattgggccgtcacccagagagataggaagatagaaactgaggatgctggccccaaaaccatgcttgagtcatacaagcttgataatattaaatatttagcagggtctatatttacgtgcctaacagtagctctgggattttatcacctgtggatcctcgag

SEQ ID NO: 1200 - protein, 247 aa, Homo sapiens
TGWTKRRVDVPVGPCPGHRCCCQRPSPMLQHGAYTHFLQESAGYLQLEHRRDFSSSGSRKLSFDTRSLVCFLEDHGFATQQAEIIVSALVQVLEANVDIVYKDMATKMKQEIALQQIMSQTVNVKNDMITLEKSEFSALRAEREKIKLKLHQLKQVMDEVIKVRTDTKLDFNLEKSRVKELYSLNERKLLELRTEIVTLHAQQDWAVTQRDRKIETEDAGPKTMLESYKLDNIKYLAGSIFTCLTVA

SEQ ID NO: 1201 - DNA, 2631 bp, Homo sapiens
  CDS (1)..(2628)
atgatttacatacaagtaatttttcaagtaatgaccattgaaaaaatgttttctttttattttttagattatttctctttattcagaagcatacagttgtttgctgattgcaagaagatgtttctgtggctgtttctgattttgtcagccctgatttcttcgacaaatgcagattctgacatatcggtggaaatttgcaatgtgtgttcctgcgtgtcagttgagaatgtgctctatgtcaactgtgagaaggtttcagtctacagaccaaatcagctgaaaccaccttggtctaatttttatcacctcaatttccaaaataattttttaaatattctgtatccaaatacattcttgaatttttcacatgcagtctccctgcatctggggaataataaactgcagaacattgagggaggagcctttcttgggctcagtgcattaaagcagttgcacttgaacaacaatgaattaaagattctccgagctgacactttccttggcatagagaacttggagtatctccaggctgactacaatttaatcaagtatattgaacgaggagccttcaataagctccacaaactgaaagttctcattcttaatgacaatctgatttcattccttcctgataatattttccgattcgcatctttgacccatctggatatacgagggaacagaatccagaagctcccttatatcggggttctggaacacattggccgtgtcgttgaattgcaactggaagataacccttggaactgtagctgtgatttattgcccttaaaagcttggctggagaacatgccatataacatttacataggagaagctatctgtgaaactcccagtgacttatatggaaggcttttaaaagaaaccaacaaacaagagctatgtcccatgggcaccggcagtgattttgacgtgcgcatcctgcctccatctcagctggaaaatggctacaccactcccaatggtcacactacccaaacatctttacacagattagtaactaaaccaccaaaaacaacaaatccttccaagatctctggaatcgttgcaggcaaagccctctccaaccgcaatctcagtcagattgtgtcttaccaaacaagggtgcctcctctaacaccttgcccggcaccttgcttctgcaaaacacacccttcagatttgggactaagtgtgaactgccaagagaaaaatatacagtctatgtctgaactgataccgaaacctttaaatgcgaagaagctgcacgtcaatggcaatagcatcaaggatgtggacgtatcagacttcactgactttgaaggactggatttgcttcatctaggcagcaatcaaattacagtgattaagggagacgtatttcacaatctcactaatttacgcaggctatatctcaatggcaatcaaattgagagactctatcctgaaatattttcaggtcttcataacctgcagtatctgtatttggaatacaatttgattaaggaaatctcagcaggcacctttgactccatgccaaatttgcagttactgtacttaaacaataatctcctaaagagcctgcctgtttacatcttttccggagcacccttagctagactgaacctgaggaacaacaaattcatgtacctgcctgtcagtggggtccttgatcagttgcaatctcttacacagattgacttggagggcaacccatgggactgtacttgtgacttggtggcattaaagctgtgggtggagaagttgagcgacgggattgttgtgaaagaactgaaatgtgagacgcctgttcagtttgccaacattgaactgaagtccctcaaaaatgaaatcttatgtcccaaacttttaaataagccgtctgcaccattcacaagccctgcacctgccattacattcaccactcctttgggtcccattcgaagtcctcctggtgggccagtgcctctgtctattttaatcttaagtatcttagtggtcctcattttaacggtgtttgttgctttttgccttcttgtttttgtcctgcgacgcaacaagaaacccacagtgaagcacgaaggcctggggaatcctgactgtggctccatgcagctgcagctaaggaagcatgaccacaaaaccaataaaaaagatggactgagcacagaagctttcattccacaaactatagaacagatgagcaagagccacacttgtggcttgaaagagtcagaaactgggttcatgttttcagatcctccaggacagaaagttgttatgagaaatgtggccgacaaggagaaagatttattacatgtagataccaggaagagactgagcacaattgatgagctggatgaattattccctagcagggattccaatgtgtttattcagaattttcttgaaagcaaaaaggagtataatagcataggtgtcagtggctttgagatccgctatccagaaaaacaaccagacaaaaaaagtaagaagtcactgataggtggcaaccacagtaaaattgttgtggaacaaaggaagagtgagtattttgaactgaaggcgaaactgcagagttcccctgactacctacaggtccttgaggagcaaacagctttgaacaagatctag

SEQ ID NO: 1202 - protein, 876 aa, Homo sapiens [sequence omitted]

SEQ ID NO: 1203 - DNA, 1800 bp, Homo sapiens
  CDS (1)..(1800)
ggatccgattctgacatatcggtggaaatttgcaatgtgtgttcctgcgtgtcagttgagaatgtgctctatgtcaactgtgagaaggtttcagtctacagaccaaatcagctgaaaccaccttggtctaatttttatcacctcaatttccaaaataattttttaaatattctgtatccaaatacattcttgaatttttcacatgcagtctccctgcatctggggaataataaactgcagaacattgagggaggagcctttcttgggctcagtacattaaagcagttgcacttgaacaacaatgaattaaagattctccgagctgacactttccttggcatagagaacttggagtatctccaggctgactacaatttaatcaagtatattgaacgaggagccttcaataagctccacaaactgaaagttctcattcttaatgacaatctgatttcattccttcctgataatattttccgattcgcatctttgacccatctggatatacgagggaacagaatccagaagctcccttatatcggggttctggaacacattggtcgtgtcgttgaattgcaactggaagataacccttggaactgtagctgtgatttattgcccttaaaagcttggctggagaacatgccatataacatttacataggagaagctatctgtgaaactcccagtgacttatatggaaggcttttaaaagaaaccaacaaacaagagctatgtcccatgggcaccggcagtgattttgacgtgcgcatcctgcctccatctcagctggaaaatggctacaccactcccaatggtcacactacccaaacatctttacacagattagtaactaaaccaccaaaaacaacaaatccttccaagatctctggaatcgttgcaggtaaagccctctccaaccgcaatctcagtcagattgtgtcttaccaaacaagggtgcctcctctaacaccttgcccggcaccttgcttctgcaaaacacacccttcagatttgggactaagtgtgaactgccaagagaaaaatatacagtctatgtctgaactgataccgaaacctttaaatgcgaagaagctgcacgtcaatggcaatagcatcaaggatgtggacgtatcagacttcactgactttgaaggactggatttgcttcatttaggcagcaatcaaattacagtgattaagggagacgtatttcacaatctcactaatttacgcaggctatatctcaatggcaatcaaattgagagactctatcctgaaatattttcaggtcttcataacctgcagtatctgtatttggaatacaatttgattaaggaaatctcagcaggcacctttgactccatgccaaatttgcagttactgtacttaagcaataatctcctaaagagcctgcctgtttacatcttttccggagcacccttagctagactgaacctgaggaacaacaaattcatgtacctgcctgtcagtggggtccttgatcagttgcaatctcttacacagattgacttggagggcagcccatgggactatacttgtgacttggtggcattaaagctgtgggtggagaagttgagcgacgggattgttgtgaaagaactgaaatgtgagacgcctgttcagtttaccaacattgaactgaagtccctcaaaaatgaaatcttatgtcccaaacttttaaataagccgtctgcaccattcacaagccctgcacctgccattacattcaccactcctttgggtcccattcgaagtcctcctggtgggccactcgag

SEQ ID NO: 1204 - protein, 600 aa, Homo sapiens
GSDSDISVEICNVCSCVSVENVLYVNCEKVSVYRPNQLKPPWSNFYHLNFQNNFLNILYPNTFLNFSHAVSLHLGNNKLQNIEGGAFLGLSTLKQLHLNNNELKILRADTFLGIENLEYLQADYNLIKYIERGAFNKLHKLKVLILNDNLISFLPDNIFRFASLTHLDIRGNRIQKLPYIGVLEHIGRVVELQLEDNPWNCSCDLLPLKAWLENMPYNIYIGEAICETPSDLYGRLLKETNKQELCPMGTGSDFDVRILPPSQLENGYTTPNGHTTQTSLHRLVTKPPKTTNPSKISGIVAGKALSNRNLSQIVSYQTRVPPLTPCPAPCFCKTHPSDLGLSVNCQEKNIQSMSELIPKPLNAKKLHVNGNSIKDVDVSDFTDFEGLDLLHLGSNQITVIKGDVFHNLTNLRRLYLNGNQIERLYPEIFSGLHNLQYLYLEYNLIKEISAGTFDSMPNLQLLYLSNNLLKSLPVYIFSGAPLARLNLRNNKFMYLPVSGVLDQLQSLTQIDLEGSPWDYTCDLVALKLWVEKLSDGIVVKELKCETPVQFTNIELKSLKNEILCPKLLNKPSAPFTSPAPAITFTTPLGPIRSPPGGPLE

SEQ ID NO: 1205 - DNA, 1800 bp, Homo sapiens
  CDS (1)..(1800)
ggatccgattctgacatatcggtggaaatttgcaatgtgtgttcctgcgtgtcagttgagaatgtgctctatgtcaactgtgagaaggtttcagtctacagaccaaatcagctgaaaccaccttggtctaatttttatcacctcaatttccaaaataattttttaaatattctgtatccaaatacattcttgaatttttcacatgcagtctccctgcatctggggaataataaactgcagaacattgagggaggagcctttcttgggctcagtgcattaaagcagttgcacttgaacaacaatgaattaaagattctccgagctgacactttccctggcatagagaacttggagtatctccaggctgactacaatttaatcaagtatattgaacgaggagccttcaataagctccacaaactgaaagttctcattcttaatgacaatctgatttcattccttcctgataatattttccgattcgcatctttgacccatctggatatacgagggaacagaatccagaagctcccttatatcggggttctggaacacattggccgtgtcgttgaattgcaactggaagataacccttggaactgtagctgtgatttattgcccttaaaagcttggctggagaacatgccatataacatttacataggagaagctatctgtgaaactcccagtgacttatatggaaggcttttaaaagaaaccaacaaacaagagctatgtcccatgggcaccggcagtgattttgacgtgcgcatcctgcctccatctcagctggaaaatggctacaccactcccaatggtcacactacccaaacatctttacacagattagtaactaaaccaccaaaaacaacaaatccttccaagatctctggaatcgttgcaggcaaagccctctccaaccgcaatctcagtcagattgtgtcttaccaaacaagggtgcctcctctaacaccttgcccggcaccttgcttctgcaaaacacacccttcagatttgggactaagtgtgaactgccaagagaaaaatatacagtctatgtctgaactgataccgaaacctttaaatgcgaagaagctgcacgtcaatggcaatagcatcaaggatgtggacgtatcagacttcactgactttgaaggactggatttgcttcatttaggcagcaatcaaattacagtgattaagggagacgtatttcacaatctcactaatttacgcaggctatatctcaatggcaatcaaattgagagactctatcctgaaatattttcaggtcttcataacctgcagtatctgtatttggaatacaatttgattaaggaaatctcagcaggcacctttgactccatgccaaatttgcagttactgtacttaaacaataatctcctaaagagcctgcctgtttacatcttttccggagcacccttagctagactgaacctgaggaacaacaaattcatgtacctgcctgtcagtggggtccttgatcagttgcaatctcttacacagattgacttggagggcaacccatgggactgtacttgtgacttggtggcattaaagctgtgggtggggaagttgagcgacgggattgttgtgaaagaactgaaatgtgagacgcctgttcagtttgccaacattgaactgaagtccctcaaaaatgaaatcttatgtcccaaacttttaaataagccgtctgcaccattcacaagccctgcacctaccattacattcaccactcctttgggtcccattcgaagtcctcctggtgggccactcgag

SEQ ID NO: 1206 - protein, 600 aa, Homo sapiens
GSDSDISVEICNVCSCVSVENVLYVNCEKVSVYRPNQLKPPWSNFYHLNFQNNFLNILYPNTFLNFSHAVSLHLGNNKLQNIEGGAFLGLSALKQLHLNNNELKILRADTFPGIENLEYLQADYNLIKYIERGAFNKLHKLKVLILNDNLISFLPDNIFRFASLTHLDIRGNRIQKLPYIGVLEHIGRVVELQLEDNPWNCSCDLLPLKAWLENMPYNIYIGEAICETPSDLYGRLLKETNKQELCPMGTGSDFDVRILPPSQLENGYTTPNGHTTQTSLHRLVTKPPKTTNPSKISGIVAGKALSNRNLSQIVSYQTRVPPLTPCPAPCFCKTHPSDLGLSVNCQEKNIQSMSELIPKPLNAKKLHVNGNSIKDVDVSDFTDFEGLDLLHLGSNQITVIKGDVFHNLTNLRRLYLNGNQIERLYPEIFSGLHNLQYLYLEYNLIKEISAGTFDSMPNLQLLYLNNNLLKSLPVYIFSGAPLARLNLRNNKFMYLPVSGVLDQLQSLTQIDLEGNPWDCTCDLVALKLWVGKLSDGIVVKELKCETPVQFANIELKSLKNEILCPKLLNKPSAPFTSPAPTITFTTPLGPIRSPPGGPLE

SEQ ID NO: 1207 - DNA, 2654 bp, Homo sapiens
  CDS (19)..(2646)
ccatgtgttcactatggtatgatttacatacaagtaatttttcaagtaatgaccattgaaaaaatgttttctttttattttttagattatttctctttattcagaagcatacagttgtttgctgattgcaagaagatgtttctgtggctgtttctgattttgtcagccctgatttcttcgacaaatgcagattctgacatatcggtggaaatttgcaatgtgtgttcctgcgtgtcagttgagaatgtgctctatgtcaactgtgagaaggtttcagtctacagaccaaatcagctgaaaccaccttggtctaatttttatcacctcaatttccaaaataattttttaaatattctgtatccaaatacattcttgaatttttcacatgcagtctccctgcatctggggaataataaactgcagaacattgagggaggagcctttcttgggctcagtgcattaaagcagttgcacttgaacaacaatgaattaaagattctccgagctgacactttccttggcatagagaacttggagtatctccaggctgactacaatttaatcaagtatattgaacgaggagccttcaataagctccacaaactgaaagttctcattcttaatgacaatctgatttcattccttcctgataatattttccgattcgcatctttgacccatctggatatacgagggaacagaatccagaagctcccttatatcggggttctggaacacattggccgtgtcgttgaattgcaactggaagataacccttggaactgtagctgtgatttattgcccttaaaagcttggctggagaacatgccatataacatttacataggagaagctatctgtgaaactcccagtgacttatatggaaggcttttaaaagaaaccaacaaacaagagctatgtcccatgggcaccggcagtgattttgacgtgcgcatcctgcctccatctcagctggaaaatggctacaccactcccaatggtcacactacccaaacatctttacacagattagtaactaaaccaccaaaaacaacaaatccttccaagatctctggaatcgttgcaggcaaagccctctccaaccgcaatctcagtcagattgtgtcttaccaaacaagggtgcctcctctaacaccttgcccggcaccttgcttctgcaaaacacacccttcagatttgggactaagtgtgaactgccaagagaaaaatatacagtctatgtctgaactgataccgaaacctttaaatgcgaagaagctgcacgtcaatggcaatagcatcaaggatgtggacgtatcagacttcactgactttgaaggactggatttgcttcatttaggcagcaatcaaattacagtgattaagggagacgtatttcacaatctcactaatttacgcaggctatatctcaatggcaatcaaattgagagactctatcctgaaatattttcaggtcttcataacctgcagtatctgtatttggaatacaatttgattaaggaaatctcagcaggcacctttgactccatgccaaatttgcagttactgtacttaaacaataatctcctaaagagcctgcctgtttacatcttttccggagcacccttagctagactgaacctgaggaacaacaaattcatgtacctgcctgtcagtggggtccttgatcagttgcaatctcttacacagattgacttggagggcaacccatgggactgtacttgtgacttggtggcattaaagctgtgggtggagaagttgagcgacgggattgttgtgaaagaactgaaatgtgagacgcctgttcagtttgccaacattgaactgaagtccctcaaaaatgaaatcttatgtcccaaacttttaaataagccgtctgcaccattcacaagccctgcacctgccattacattcaccactcctttgggtcccattcgaagtcctcctggtgggccagtgcctctgtctattttaatcttaagtatcttagtggtcctcattttaacggtgtttgttgctttttgccttcttgtttttgtcctgcgacgcaacaagaaacccacagtgaagcacgaaggcctggggaatcctgactgtggctccatgcagctgcagctaaggaagcatgaccacaaaaccaataaaaaagatggactgagcacagaagctttcattccacaaactatagaacagatgagcaagagccacacttgtggcttgaaagagtcagaaactgggttcatgttttcagatcctccaggacagaaagttgttatgagaaatgtggccgacaaggagaaagatttattacatgtagataccaggaagagactgagcacaattgatgagctggatgaattattccctagcagggattccaatgtgtttattcagaattttcttgaaagcaaaaaggagtataatagcataggtgtcagtggctttgagatccgctatccagaaaaacaaccagacaaaaaaagtaagaagtcactgataggtggcaaccacagtaaaattgttgtggaacaaaggaagagtgagtattttgaactgaaggcgaaactgcagagttcccctgactacctacaggtccttgaggagcaaacagctttgaacaagatctaggtcat

SEQ ID NO: 1208 - protein, 876 aa, Homo sapiens [sequence omitted]

SEQ ID NO: 1209 - DNA, 2469 bp, Homo sapiens
  CDS (7)..(2463)
ggatccgattctgacatatcggtggaaatttgcaatgtgtgttcctgcgtgtcagttgagaatgtgctctatgtcaactgtgagaaggtttcagtctacaggccaaatcagctgaaaccaccttggtctaatttttatcacctcaatttccaaaataattttttaaatattctgtatccaaatacattcttgaatttttcacatgcagtctccctgcatctggggaataataaactgcagaacattgagggaggagcctttcttgggctcagtgcattaaagcagttgcacttgaacaacaatgaattaaagattctccgagctgacactttccttggcatagagaacttggagtatctccaggctgactacaatttaatcaagtatattgaacgaggagccttcaataagctccacaaactgaaagttctcattcttaatgacaatctgatttcattccttcctgataatattttccgattcgcatctttgacccatctggatatacgagggaacagaatccagaagctcccttatatcggggttctggaacacattggccgtgtcgttgaattgcaactggaagataacccttggaactgtagctgtgatttattgcccttaaaagcttggctggagaacatgccatataacatttacataggagaagctatctgtgaaactcccagtgacctatatggaaggcttttaaaagaaaccaacaaacaagagctatgtcccatgggcaccggcagtgattttgacgtgcgcatcctgcctccatctcagctggaaaatggctacaccactcccaatggtcacactacccaaacatctttacacagattagtaactaaaccaccaaaaacaacaaatccttccaagatctctggaatcgttgcaggcaaagccctctccaaccgcaatctcagtcagattgtgtcttaccaaacaagggtgcctcctctaacaccttgcccggcaccttgcttctgcaaaacacacccttcagatttgggactaagtgtgaactgccaagagaaaaatatacagtctatgtctgaactgataccgaaacctttaaatgcgaagaagctgcacgtcaatggcaatagcatcaaggatgtggacgtatcagacttcactgactttgaaggactggatttgcttcatttaggcagcaatcaaattacagtgattaagggagacgtatttcacaatctcactaatttacgcaggctatatctcaatggcaatcaaattgagagactctatcctgaaatattttcaggtcttcataacctgcagtatccgtatttggaatacaatttgattaaggaaatctcagcaggcacctttgactccatgccaaatttgcagttactgtacttaaacaataatctcctaaagagcctgcctgtttacatcttttccggagcacccttagctagactgaacctgaggaacaacaaattcatgtacctgcctgtcagtggggtccttgatcagttgcaatctcttacacagattgacttggagggcaacccatgggactgtacttgtgacttggtggcattaaagctgtgggtggagaagttgagcgacgggattgttgtgaaagaactgaaatgtgagacgcctgttcagtttgccaacattgaactgaagtccctcaaaaatgaaatcttatgtcccaaacttttaaataagccgtctgcaccattcacaagccctgcacctgccattacattcaccactcctttgggtcccattcgaagtcctcctggtgggccagtgcctctgtctattttaatcttaagtatcttagtggtcctcattttaacggtgtttgttgctttttgccttcttgtttttgtcctgcgacgcaacaagaaacccacagtgaagcacgaaggcctggggaatcctgactgtggctccatgcagctgcagctaaggaagcatgaccacaaaaccaataaaaaagatggactgagcacagaagctttcattccacaaactatagaacagatgagcaagagccacacttgtggcttgaaagagtcagaaactgggttcatgttttcagatcctccaggacagaaagttgttatgagaaatgtggccgacaaggagaaagatttattacatgtagataccaggaagagactgagcacaattgatgagctggatgaattattccctagcagggattccaatgtgtttattcagaattttcttgaaagcaaaaaggagtataatagcataggtgtcagtggctttgagatccgctatccagaaaaacaaccagacaaaaaaagtaagaagtcactgataggtggcaaccacagtaaaattgttgtggaacaaaggaagagtgagtattttgaactgaaggcgaaactgcagagttcccctgactacctacaggtccttgaggagcaaacagctttgaacaagatcctcgag

SEQ ID NO: 1210 - protein, 819 aa, Homo sapiens
DSDISVEICNVCSCVSVENVLYVNCEKVSVYRPNQLKPPWSNFYHLNFQNNFLNILYPNTFLNFSHAVSLHLGNNKLQNIEGGAFLGLSALKQLHLNNNELKILRADTFLGIENLEYLQADYNLIKYIERGAFNKLHKLKVLILNDNLISFLPDNIFRFASLTHLDIRGNRIQKLPYIGVLEHIGRVVELQLEDNPWNCSCDLLPLKAWLENMPYNIYIGEAICETPSDLYGRLLKETNKQELCPMGTGSDFDVRILPPSQLENGYTTPNGHTTQTSLHRLVTKPPKTTNPSKISGIVAGKALSNRNLSQIVSYQTRVPPLTPCPAPCFCKTHPSDLGLSVNCQEKNIQSMSELIPKPLNAKKLHVNGNSIKDVDVSDFTDFEGLDLLHLGSNQITVIKGDVFHNLTNLRRLYLNGNQIERLYPEIFSGLHNLQYPYLEYNLIKEISAGTFDSMPNLQLLYLNNNLLKSLPVYIFSGAPLARLNLRNNKFMYLPVSGVLDQLQSLTQIDLEGNPWDCTCDLVALKLWVEKLSDGIVVKELKCETPVQFANIELKSLKNEILCPKLLNKPSAPFTSPAPAITFTTPLGPIRSPPGGPVPLSILILSILVVLILTVFVAFCLLVFVLRRNKKPTVKHEGLGNPDCGSMQLQLRKHDHKTNKKDGLSTEAFIPQTIEQMSKSHTCGLKESETGFMFSDPPGQKVVMRNVADKEKDLLHVDTRKRLSTIDELDELFPSRDSNVFIQNFLESKKEYNSIGVSGFEIRYPEKQPDKKSKKSLIGGNHSKIVVEQRKSEYFELKAKLQSSPDYLQVLEEQTALNKI

SEQ ID NO: 1211 - DNA, 1800 bp, Homo sapiens; identical to SEQ ID NO: 1205
  CDS (7)..(1794)

SEQ ID NO: 1212 - protein, 596 aa, Homo sapiens
DSDISVEICNVCSCVSVENVLYVNCEKVSVYRPNQLKPPWSNFYHLNFQNNFLNILYPNTFLNFSHAVSLHLGNNKLQNIEGGAFLGLSALKQLHLNNNELKILRADTFPGIENLEYLQADYNLIKYIERGAFNKLHKLKVLILNDNLISFLPDNIFRFASLTHLDIRGNRIQKLPYIGVLEHIGRVVELQLEDNPWNCSCDLLPLKAWLENMPYNIYIGEAICETPSDLYGRLLKETNKQELCPMGTGSDFDVRILPPSQLENGYTTPNGHTTQTSLHRLVTKPPKTTNPSKISGIVAGKALSNRNLSQIVSYQTRVPPLTPCPAPCFCKTHPSDLGLSVNCQEKNIQSMSELIPKPLNAKKLHVNGNSIKDVDVSDFTDFEGLDLLHLGSNQITVIKGDVFHNLTNLRRLYLNGNQIERLYPEIFSGLHNLQYLYLEYNLIKEISAGTFDSMPNLQLLYLNNNLLKSLPVYIFSGAPLARLNLRNNKFMYLPVSGVLDQLQSLTQIDLEGNPWDCTCDLVALKLWVGKLSDGIVVKELKCETPVQFANIELKSLKNEILCPKLLNKPSAPFTSPAPTITFTTPLGPIRSPPGGP

SEQ ID NO: 1213 - DNA, 22 bp, Artificial Sequence
  Description of Artifical Sequence:  Primer/Probe
aaagaaggataccagggtgatg

SEQ ID NO: 1214 - DNA, 26 bp, Artificial Sequence
  Description of Artifical Sequence:  Primer/Probe
tatgattgaaccttcaggtccaattc

SEQ ID NO: 1215 - DNA, 22 bp, Artificial Sequence
  Description of Artifical Sequence:  Primer/Probe
ggtaccatttccctttggtaca

SEQ ID NO: 1216 - DNA, 20 bp, Artificial Sequence
  Description of Artifical Sequence:  Primer/Probe
ctgcacttggctggaactta

SEQ ID NO: 1217 - DNA, 26 bp, Artificial Sequence
  Description of Artifical Sequence:  Primer/Probe
ttttcatctcctactccaggtgtacc

SEQ ID NO: 1218 - DNA, 20 bp, Artificial Sequence
  Description of Artifical Sequence:  Primer/Probe
atctccacaggccctgtaat

SEQ ID NO: 1219 - DNA, 21 bp, Artificial Sequence
  Description of Artifical Sequence:  Primer/Probe
ccgcttcatctctgatttctc

SEQ ID NO: 1220 - DNA, 26 bp, Artificial Sequence
  Description of Artifical Sequence:  Primer/Probe
ttgaaggattcaacatcaccttctca

SEQ ID NO: 1221 - DNA, 20 bp, Artificial Sequence
  Description of Artifical Sequence:  Primer/Probe
acagggctccaagtcgtact

SEQ ID NO: 1222 - DNA, 22 bp, Artificial Sequence
  Description of Artifical Sequence:  Primer/Probe
catgtctcttttcgggaacata

SEQ ID NO: 1223 - DNA, 28 bp, Artificial Sequence
  Description of Artifical Sequence:  Primer/Probe
tcacagtaaacatcaccttcttggaagt

SEQ ID NO: 1224 - DNA, 22 bp, Artificial Sequence
  Description of Artifical Sequence:  Primer/Probe
gaaggccataatcttccatttt

SEQ ID NO: 1225 - DNA, 21 bp, Artificial Sequence
  Description of Artifical Sequence:  Primer/Probe
cagggaagcagtacgaggttt

SEQ ID NO: 1226 - DNA, 30 bp, Artificial Sequence
  Description of Artifical Sequence:  Primer/Probe
ttggaggaagtgtccctaaaatcatttatc

SEQ ID NO: 1227 - DNA, 20 bp, Artificial Sequence
  Description of Artifical Sequence:  Primer/Probe
tgactctccagcatcgtaga

SEQ ID NO: 1228 - DNA, 20 bp, Artificial Sequence
  Description of Artifical Sequence:  Primer/Probe
cagtgagataccacatgccg

SEQ ID NO: 1229 - DNA, 26 bp, Artificial Sequence
  Description of Artifical Sequence:  Primer/Probe
tagctgccgcagcacacaccttgcta

SEQ ID NO: 1230 - DNA, 22 bp, Artificial Sequence
  Description of Artifical Sequence:  Primer/Probe
gtcatcttccagccataggtgt

SEQ ID NO: 1231 - DNA, 22 bp, Artificial Sequence
  Description of Artifical Sequence:  Primer/Probe
tagaggagctgctcagcaaata

SEQ ID NO: 1232 - DNA, 23 bp, Artificial Sequence
  Description of Artifical Sequence:  Primer/Probe
tcacaacgagtctcactcccggg

SEQ ID NO: 1233 - DNA, 21 bp, Artificial Sequence
  Description of Artifical Sequence:  Primer/Probe
catgaggatctcctccttgtc

SEQ ID NO: 1234 - DNA, 22 bp, Artificial Sequence
  Description of Artifical Sequence:  Primer/Probe
tagaggagctgctcagcaaata

SEQ ID NO: 1235 - DNA, 23 bp, Artificial Sequence
  Description of Artifical Sequence:  Primer/Probe
tcacaacgagtctcactcccggg

SEQ ID NO: 1236 - DNA, 21 bp, Artificial Sequence
  Description of Artifical Sequence:  Primer/Probe
catgaggatctcctccttgtc

SEQ ID NO: 1237 - DNA, 22 bp, Artificial Sequence
  Description of Artifical Sequence:  Primer/Probe
ccctcttactctagcccatttg

SEQ ID NO: 1238 - DNA, 26 bp, Artificial Sequence
  Description of Artifical Sequence:  Primer/Probe
ttgtctgaccagcaaacattaaaacc

SEQ ID NO: 1239 - DNA, 22 bp, Artificial Sequence
  Description of Artifical Sequence:  Primer/Probe
acagtccgtccctaccaataga

SEQ ID NO: 1240 - DNA, 21 bp, Artificial Sequence
  Description of Artifical Sequence:  Primer/Probe
ttgacctcaggaacggtttac

SEQ ID NO: 1241 - DNA, 26 bp, Artificial Sequence
  Description of Artifical Sequence:  Primer/Probe
tctgctgcccaggaatactttctcca

SEQ ID NO: 1242 - DNA, 22 bp, Artificial Sequence
  Description of Artifical Sequence:  Primer/Probe
agtatttggagggcttcttcag

SEQ ID NO: 1243 - DNA, 21 bp, Artificial Sequence
  Description of Artifical Sequence:  Primer/Probe
ggagcttggtctcatgaccta

SEQ ID NO: 1244 - DNA, 23 bp, Artificial Sequence
  Description of Artifical Sequence:  Primer/Probe
tactgggctcctggccaccaaga

SEQ ID NO: 1245 - DNA, 21 bp, Artificial Sequence
  Description of Artifical Sequence:  Primer/Probe
agtcgtccatcctgtttcatc

SEQ ID NO: 1246 - DNA, 21 bp, Artificial Sequence
  Description of Artifical Sequence:  Primer/Probe
ggagcttggtctcatgaccta

SEQ ID NO: 1247 - DNA, 23 bp, Artificial Sequence
  Description of Artifical Sequence:  Primer/Probe
tactgggctcctggccaccaaga

SEQ ID NO: 1248 - DNA, 21 bp, Artificial Sequence
  Description of Artifical Sequence:  Primer/Probe
agtcgtccatcctgtttcatc

SEQ ID NO: 1249 - DNA, 19 bp, Artificial Sequence
  Description of Artifical Sequence:  Primer/Probe
gctgccctgacttgtgcaa

SEQ ID NO: 1250 - DNA, 25 bp, Artificial Sequence
  Description of Artifical Sequence:  Primer/Probe
ttctgacccagtgtgcatctcccgt

SEQ ID NO: 1251 - DNA, 19 bp, Artificial Sequence
  Description of Artifical Sequence:  Primer/Probe
ccggtctggcagacacact

SEQ ID NO: 1252 - DNA, 18 bp, Artificial Sequence
  Description of Artifical Sequence:  Primer/Probe
ccaatgacctggccacca

SEQ ID NO: 1253 - DNA, 27 bp, Artificial Sequence
  Description of Artifical Sequence:  Primer/Probe
tccagagtccgttcagcttcaggacag

SEQ ID NO: 1254 - DNA, 20 bp, Artificial Sequence
  Description of Artifical Sequence:  Primer/Probe
gtggcacgttgctgtttagc

SEQ ID NO: 1255 - DNA, 19 bp, Artificial Sequence
  Description of Artifical Sequence:  Primer/Probe
gaacgccggagcatacaga

SEQ ID NO: 1256 - DNA, 27 bp, Artificial Sequence
  Description of Artifical Sequence:  Primer/Probe
tccaggtactgcacaaacacggcttca

SEQ ID NO: 1257 - DNA, 17 bp, Artificial Sequence
  Description of Artifical Sequence:  Primer/Probe
gatgccacaggcccaca

SEQ ID NO: 1258 - DNA, 22 bp, Artificial Sequence
  Description of Artifical Sequence:  Primer/Probe
gggctataagtcagtcggaagt

SEQ ID NO: 1259 - DNA, 26 bp, Artificial Sequence
  Description of Artifical Sequence:  Primer/Probe
tcctgtatttgtctgccaagccaatc

SEQ ID NO: 1260 - DNA, 22 bp, Artificial Sequence
  Description of Artifical Sequence:  Primer/Probe
acagtcgagaggaacacacatc

SEQ ID NO: 1261 - DNA, 20 bp, Artificial Sequence
  Description of Artifical Sequence:  Primer/Probe
cccgggttacactgatacct

SEQ ID NO: 1262 - DNA, 26 bp, Artificial Sequence
  Description of Artifical Sequence:  Primer/Probe
ttgctccagaaagccattctcaacct

SEQ ID NO: 1263 - DNA, 20 bp, Artificial Sequence
  Description of Artifical Sequence:  Primer/Probe
cggtatcttgtggtgaacca

SEQ ID NO: 1264 - DNA, 22 bp, Artificial Sequence
  Description of Artifical Sequence:  Primer/Probe
ctgcaaaatcttacgactttgg

SEQ ID NO: 1265 - DNA, 30 bp, Artificial Sequence
  Description of Artifical Sequence:  Primer/Probe
tcaacaaacaatggctacatcaaatttagc

SEQ ID NO: 1266 - DNA, 22 bp, Artificial Sequence
  Description of Artifical Sequence:  Primer/Probe
atgacactcagcaaacctgagt

SEQ ID NO: 1267 - DNA, 22 bp, Artificial Sequence
  Description of Artifical Sequence:  Primer/Probe
ctgcaaaatcttacgactttgg

SEQ ID NO: 1268 - DNA, 30 bp, Artificial Sequence; identical to SEQ ID NO: 1265
  Description of Artifical Sequence:  Primer/Probe

SEQ ID NO: 1269 - DNA, 22 bp, Artificial Sequence
  Description of Artifical Sequence:  Primer/Probe
atgacactcagcaaacctgagt

SEQ ID NO: 1270 - DNA, 22 bp, Artificial Sequence
  Description of Artifical Sequence:  Primer/Probe
ctgcaaaatcttacgactttgg

SEQ ID NO: 1271 - DNA, 30 bp, Artificial Sequence; identical to SEQ ID NO: 1265
  Description of Artifical Sequence:  Primer/Probe

SEQ ID NO: 1272 - DNA, 21 bp, Artificial Sequence
  Description of Artifical Sequence:  Primer/Probe
tcagcaaacctgagtcctgta

SEQ ID NO: 1273 - DNA, 22 bp, Artificial Sequence
  Description of Artifical Sequence:  Primer/Probe
ctgcaaaatcttacgactttgg

SEQ ID NO: 1274 - DNA, 30 bp, Artificial Sequence; identical to SEQ ID NO: 1265
  Description of Artifical Sequence:  Primer/Probe

SEQ ID NO: 1275 - DNA, 22 bp, Artificial Sequence
  Description of Artifical Sequence:  Primer/Probe
atgacactcagcaaacctgagt

SEQ ID NO: 1276 - DNA, 22 bp, Artificial Sequence
  Description of Artifical Sequence:  Primer/Probe
ctgcaaaatcttacgactttgg

SEQ ID NO: 1277 - DNA, 30 bp, Artificial Sequence; identical to SEQ ID NO: 1265
  Description of Artifical Sequence:  Primer/Probe

SEQ ID NO: 1278 - DNA, 22 bp, Artificial Sequence
  Description of Artifical Sequence:  Primer/Probe
atgacactcagcaaacctgagt

SEQ ID NO: 1279 - DNA, 22 bp, Artificial Sequence
  Description of Artifical Sequence:  Primer/Probe
ccaaggttttagctgtggatct

SEQ ID NO: 1280 - DNA, 24 bp, Artificial Sequence
  Description of Artifical Sequence:  Primer/Probe
tacatccactgcctggaagaccct

SEQ ID NO: 1281 - DNA, 22 bp, Artificial Sequence
  Description of Artifical Sequence:  Primer/Probe
cacatttcacactcagctctga

SEQ ID NO: 1282 - DNA, 20 bp, Artificial Sequence
  Description of Artifical Sequence:  Primer/Probe
caggagcatttcgtgaaaga

SEQ ID NO: 1283 - DNA, 26 bp, Artificial Sequence
  Description of Artifical Sequence:  Primer/Probe
tttttgcacctttatctgcagccttt

SEQ ID NO: 1284 - DNA, 20 bp, Artificial Sequence
  Description of Artifical Sequence:  Primer/Probe
tttaacccgagcttcctcat

SEQ ID NO: 1285 - DNA, 21 bp, Artificial Sequence
  Description of Artifical Sequence:  Primer/Probe
ctggttgtaggttgccatggt

SEQ ID NO: 1286 - DNA, 24 bp, Artificial Sequence
  Description of Artifical Sequence:  Primer/Probe
tcagcttcgttggcacaggcctct

SEQ ID NO: 1287 - DNA, 26 bp, Artificial Sequence
  Description of Artifical Sequence:  Primer/Probe
ccagtataagctgacctttgacaaag

SEQ ID NO: 1288 - DNA, 21 bp, Artificial Sequence
  Description of Artifical Sequence:  Primer/Probe
ctggttgtaggttgccatggt

SEQ ID NO: 1289 - DNA, 24 bp, Artificial Sequence
  Description of Artifical Sequence:  Primer/Probe
tcagcttcgttggcacaggcctct

SEQ ID NO: 1290 - DNA, 26 bp, Artificial Sequence
  Description of Artifical Sequence:  Primer/Probe
ccagtataagctgacctttgacaaag

SEQ ID NO: 1291 - DNA, 22 bp, Artificial Sequence
  Description of Artifical Sequence:  Primer/Probe
cttacaacaccacgggactaag

SEQ ID NO: 1292 - DNA, 26 bp, Artificial Sequence
  Description of Artifical Sequence:  Primer/Probe
taagagcacttccttgcctccgtaag

SEQ ID NO: 1293 - DNA, 22 bp, Artificial Sequence
  Description of Artifical Sequence:  Primer/Probe
agatcaaatgattgggatggtt

SEQ ID NO: 1294 - DNA, 20 bp, Artificial Sequence
  Description of Artifical Sequence:  Primer/Probe
gtctacctcattgtccacgt

SEQ ID NO: 1295 - DNA, 24 bp, Artificial Sequence
  Description of Artifical Sequence:  Primer/Probe
tctcgtcgcctgtgatggtgaatg

SEQ ID NO: 1296 - DNA, 19 bp, Artificial Sequence
  Description of Artifical Sequence:  Primer/Probe
caaagcaggttcacattgc

SEQ ID NO: 1297 - DNA, 20 bp, Artificial Sequence
  Description of Artifical Sequence:  Primer/Probe
atgacagactgctgagcagc

SEQ ID NO: 1298 - DNA, 23 bp, Artificial Sequence
  Description of Artifical Sequence:  Primer/Probe
taaggcctgaaggtgcagacgga

SEQ ID NO: 1299 - DNA, 19 bp, Artificial Sequence
  Description of Artifical Sequence:  Primer/Probe
cgttggcaaagagaagcat

SEQ ID NO: 1300 - DNA, 20 bp, Artificial Sequence
  Description of Artifical Sequence:  Primer/Probe
atgacagactgctgagcagc

SEQ ID NO: 1301 - DNA, 23 bp, Artificial Sequence
  Description of Artifical Sequence:  Primer/Probe
taaggcctgaaggtgcagacgga

SEQ ID NO: 1302 - DNA, 19 bp, Artificial Sequence
  Description of Artifical Sequence:  Primer/Probe
cgttggcaaagagaagcat

SEQ ID NO: 1303 - DNA, 21 bp, Artificial Sequence
  Description of Artifical Sequence:  Primer/Probe
acctggacatagggcgtgtct

SEQ ID NO: 1304 - DNA, 26 bp, Artificial Sequence
  Description of Artifical Sequence:  Primer/Probe
tcgaagcatgaacgaagccatcccta

SEQ ID NO: 1305 - DNA, 20 bp, Artificial Sequence
  Description of Artifical Sequence:  Primer/Probe
tcgatggaagtctccttgcc

SEQ ID NO: 1306 - DNA, 21 bp, Artificial Sequence
  Description of Artifical Sequence:  Primer/Probe
caccgtgagccaactgcttat

SEQ ID NO: 1307 - DNA, 24 bp, Artificial Sequence
  Description of Artifical Sequence:  Primer/Probe
tagacacgccctatgtccaggtcc

SEQ ID NO: 1308 - DNA, 19 bp, Artificial Sequence
  Description of Artifical Sequence:  Primer/Probe
ttcgttcatgcttcggcaa

SEQ ID NO: 1309 - DNA, 19 bp, Artificial Sequence
  Description of Artifical Sequence:  Primer/Probe
ccaggctgaaggtcatcac

SEQ ID NO: 1310 - DNA, 26 bp, Artificial Sequence
  Description of Artifical Sequence:  Primer/Probe
tctaacatcctccagctgcaggtgaa

SEQ ID NO: 1311 - DNA, 21 bp, Artificial Sequence
  Description of Artifical Sequence:  Primer/Probe
gactagcagctcctggtcatt

SEQ ID NO: 1312 - DNA, 20 bp, Artificial Sequence
  Description of Artifical Sequence:  Primer/Probe
ccaggagctgctagtcaaga

SEQ ID NO: 1313 - DNA, 26 bp, Artificial Sequence
  Description of Artifical Sequence:  Primer/Probe
tctggattcaacacgctctccttcct

SEQ ID NO: 1314 - DNA, 20 bp, Artificial Sequence
  Description of Artifical Sequence:  Primer/Probe
aggaggttcatgacctgctt

SEQ ID NO: 1315 - DNA, 21 bp, Artificial Sequence
  Description of Artifical Sequence:  Primer/Probe
aagaagcatgagacgcagact

SEQ ID NO: 1316 - DNA, 26 bp, Artificial Sequence
  Description of Artifical Sequence:  Primer/Probe
tcaaagaactcccagtgcaggacaat

SEQ ID NO: 1317 - DNA, 20 bp, Artificial Sequence
  Description of Artifical Sequence:  Primer/Probe
actgtcctccactcccatgt

SEQ ID NO: 1318 - DNA, 21 bp, Artificial Sequence
  Description of Artifical Sequence:  Primer/Probe
agtgaaaaaccagctggtgaa

SEQ ID NO: 1319 - DNA, 25 bp, Artificial Sequence
  Description of Artifical Sequence:  Primer/Probe
tcatttccctcagcattgaccgtct

SEQ ID NO: 1320 - DNA, 21 bp, Artificial Sequence
  Description of Artifical Sequence:  Primer/Probe
ggcaggatacagaaggtcaaa

SEQ ID NO: 1321 - DNA, 24 bp, Artificial Sequence
  Description of Artifical Sequence:  Primer/Probe
cagaacagatgtattccccttggt

SEQ ID NO: 1322 - DNA, 22 bp, Artificial Sequence
  Description of Artifical Sequence:  Primer/Probe
tctcagcgcctcgatgtccacc

SEQ ID NO: 1323 - DNA, 17 bp, Artificial Sequence
  Description of Artifical Sequence:  Primer/Probe
ctggcttcccccaatgc

SEQ ID NO: 1324 - DNA, 20 bp, Artificial Sequence
  Description of Artifical Sequence:  Primer/Probe
gctcctggagaatggaaatc

SEQ ID NO: 1325 - DNA, 26 bp, Artificial Sequence
  Description of Artifical Sequence:  Primer/Probe
ttccctctgaagatcctggcaacttt

SEQ ID NO: 1326 - DNA, 22 bp, Artificial Sequence
  Description of Artifical Sequence:  Primer/Probe
caagctactgcaactcaaatcc

SEQ ID NO: 1327 - DNA, 22 bp, Artificial Sequence
  Description of Artifical Sequence:  Primer/Probe
caggatcttcagagggagattt

SEQ ID NO: 1328 - DNA, 26 bp, Artificial Sequence
  Description of Artifical Sequence:  Primer/Probe
tctccaggagcagatctctcatctgc

SEQ ID NO: 1329 - DNA, 22 bp, Artificial Sequence
  Description of Artifical Sequence:  Primer/Probe
atgttgggagtgaatcacaaac

SEQ ID NO: 1330 - DNA, 22 bp, Artificial Sequence
  Description of Artifical Sequence:  Primer/Probe
aaatgtcatcttcttgcaaagc

SEQ ID NO: 1331 - DNA, 26 bp, Artificial Sequence
  Description of Artifical Sequence:  Primer/Probe
ttccatttaaataatggcattttgcc

SEQ ID NO: 1332 - DNA, 22 bp, Artificial Sequence
  Description of Artifical Sequence:  Primer/Probe
cagcccaagtttcatgttaaaa

SEQ ID NO: 1333 - DNA, 20 bp, Artificial Sequence
  Description of Artifical Sequence:  Primer/Probe
ctagatgcaaagctgcaagc

SEQ ID NO: 1334 - DNA, 26 bp, Artificial Sequence
  Description of Artifical Sequence:  Primer/Probe
taagcaggagcagcagctctgagaaa

SEQ ID NO: 1335 - DNA, 20 bp, Artificial Sequence
  Description of Artifical Sequence:  Primer/Probe
cttcttcagattgcgtttgg

SEQ ID NO: 1336 - DNA, 22 bp, Artificial Sequence
  Description of Artifical Sequence:  Primer/Probe
caacagacaggtgatgatgatg

SEQ ID NO: 1337 - DNA, 27 bp, Artificial Sequence
  Description of Artifical Sequence:  Primer/Probe
ttgactttgaggacttcatcttcagcc

SEQ ID NO: 1338 - DNA, 22 bp, Artificial Sequence
  Description of Artifical Sequence:  Primer/Probe
cagtgctttgtctccaaagaag

SEQ ID NO: 1339 - DNA, 20 bp, Artificial Sequence
  Description of Artifical Sequence:  Primer/Probe
gagcctggagatggtcctga

SEQ ID NO: 1340 - DNA, 31 bp, Artificial Sequence
  Description of Artifical Sequence:  Primer/Probe
tagatcaaaagtgggcataataccctccctg

SEQ ID NO: 1341 - DNA, 24 bp, Artificial Sequence
  Description of Artifical Sequence:  Primer/Probe
atcacctgcttccagcactttagt

SEQ ID NO: 1342 - DNA, 20 bp, Artificial Sequence
  Description of Artifical Sequence:  Primer/Probe
gcctggagatggtcctgatg

SEQ ID NO: 1343 - DNA, 31 bp, Artificial Sequence
  Description of Artifical Sequence:  Primer/Probe
ttgagatcaaaagtgggcataataccctccc

SEQ ID NO: 1344 - DNA, 21 bp, Artificial Sequence
  Description of Artifical Sequence:  Primer/Probe
catcacctgcttccagcactt

SEQ ID NO: 1345 - DNA, 21 bp, Artificial Sequence
  Description of Artifical Sequence:  Primer/Probe
tcttcccagccagttggatct

SEQ ID NO: 1346 - DNA, 25 bp, Artificial Sequence
  Description of Artifical Sequence:  Primer/Probe
ttcctcagtgggctcctggacaatc

SEQ ID NO: 1347 - DNA, 23 bp, Artificial Sequence
  Description of Artifical Sequence:  Primer/Probe
cagttggtggttcctcttcttga

SEQ ID NO: 1348 - DNA, 20 bp, Artificial Sequence
  Description of Artifical Sequence:  Primer/Probe
ttgcacctagtggggagatc

SEQ ID NO: 1349 - DNA, 22 bp, Artificial Sequence
  Description of Artifical Sequence:  Primer/Probe
tacctgccgttcaagggcctga

SEQ ID NO: 1350 - DNA, 20 bp, Artificial Sequence
  Description of Artifical Sequence:  Primer/Probe
cagagccagttcctgttgaa

SEQ ID NO: 1351 - DNA, 22 bp, Artificial Sequence
  Description of Artifical Sequence:  Primer/Probe
ctgcgtttctgatctgaaaact

SEQ ID NO: 1352 - DNA, 26 bp, Artificial Sequence
  Description of Artifical Sequence:  Primer/Probe
tacccatagaaaagctccccaggagg

SEQ ID NO: 1353 - DNA, 22 bp, Artificial Sequence
  Description of Artifical Sequence:  Primer/Probe
ccaccacactcttccttgtaaa

SEQ ID NO: 1354 - DNA, 24 bp, Artificial Sequence
  Description of Artifical Sequence:  Primer/Probe
cattgttggactgaagattttctt

SEQ ID NO: 1355 - DNA, 26 bp, Artificial Sequence
  Description of Artifical Sequence:  Primer/Probe
tctccaaattccagtggaaaatccag

SEQ ID NO: 1356 - DNA, 20 bp, Artificial Sequence
  Description of Artifical Sequence:  Primer/Probe
cctgtccgtgctttcttctc

SEQ ID NO: 1357 - DNA, 22 bp, Artificial Sequence
  Description of Artifical Sequence:  Primer/Probe
ctgcgtttctgatctgaaaact

SEQ ID NO: 1358 - DNA, 26 bp, Artificial Sequence
  Description of Artifical Sequence:  Primer/Probe
tacccatagaaaagctccccaggagg

SEQ ID NO: 1359 - DNA, 22 bp, Artificial Sequence
  Description of Artifical Sequence:  Primer/Probe
ccaccacactcttccttgtaaa

SEQ ID NO: 1360 - DNA, 23 bp, Artificial Sequence
  Description of Artifical Sequence:  Primer/Probe
gtgtaagcgagagagagaagcat

SEQ ID NO: 1361 - DNA, 26 bp, Artificial Sequence
  Description of Artifical Sequence:  Primer/Probe
tatctctgatcctgtccctgctggaa

SEQ ID NO: 1362 - DNA, 23 bp, Artificial Sequence
  Description of Artifical Sequence:  Primer/Probe
tagaagaagagaagcagctggat

SEQ ID NO: 1363 - DNA, 17 bp, Artificial Sequence
  Description of Artifical Sequence:  Primer/Probe
tgctcccacatccagct

SEQ ID NO: 1364 - DNA, 25 bp, Artificial Sequence
  Description of Artifical Sequence:  Primer/Probe
tttcttctagtcctagcctccaggg

SEQ ID NO: 1365 - DNA, 22 bp, Artificial Sequence
  Description of Artifical Sequence:  Primer/Probe
gctttcttctccagtccagttc

SEQ ID NO: 1366 - DNA, 22 bp, Artificial Sequence
  Description of Artifical Sequence:  Primer/Probe
ctgcacttcaaggacagttacc

SEQ ID NO: 1367 - DNA, 25 bp, Artificial Sequence
  Description of Artifical Sequence:  Primer/Probe
tctatccatccacgatgtgcccagc

SEQ ID NO: 1368 - DNA, 22 bp, Artificial Sequence
  Description of Artifical Sequence:  Primer/Probe
tgacaaggagcttactcttcca

SEQ ID NO: 1369 - DNA, 19 bp, Artificial Sequence
  Description of Artifical Sequence:  Primer/Probe
ccctctatgtgggcctcat

SEQ ID NO: 1370 - DNA, 26 bp, Artificial Sequence
  Description of Artifical Sequence:  Primer/Probe
ttgcttgtcctcatcctcgtttattg

SEQ ID NO: 1371 - DNA, 18 bp, Artificial Sequence
  Description of Artifical Sequence:  Primer/Probe
tccagcccctccttcttc

SEQ ID NO: 1372 - DNA, 20 bp, Artificial Sequence
  Description of Artifical Sequence:  Primer/Probe
ctcatcctcagcaacaacca

SEQ ID NO: 1373 - DNA, 24 bp, Artificial Sequence
  Description of Artifical Sequence:  Primer/Probe
tcctggatgattgtgccgagacac

SEQ ID NO: 1374 - DNA, 20 bp, Artificial Sequence
  Description of Artifical Sequence:  Primer/Probe
taggagaggtcgaggtcctc

SEQ ID NO: 1375 - DNA, 20 bp, Artificial Sequence
  Description of Artifical Sequence:  Primer/Probe
ctcatcctcagcaacaacca

SEQ ID NO: 1376 - DNA, 24 bp, Artificial Sequence
  Description of Artifical Sequence:  Primer/Probe
tcctggatgattgtgccgagacac

SEQ ID NO: 1377 - DNA, 20 bp, Artificial Sequence
  Description of Artifical Sequence:  Primer/Probe
tgtaggagaggtcgaggtcc

SEQ ID NO: 1378 - DNA, 20 bp, Artificial Sequence
  Description of Artifical Sequence:  Primer/Probe
ctcatcctcagcaacaacca

SEQ ID NO: 1379 - DNA, 24 bp, Artificial Sequence
  Description of Artifical Sequence:  Primer/Probe
tcctggatgattgtgccgagacac

SEQ ID NO: 1380 - DNA, 20 bp, Artificial Sequence
  Description of Artifical Sequence:  Primer/Probe
tgtaggagaggtcgaggtcc

SEQ ID NO: 1381 - DNA, 22 bp, Artificial Sequence
  Description of Artifical Sequence:  Primer/Probe
tggagcagctcagaaaacatgt

SEQ ID NO: 1382 - DNA, 25 bp, Artificial Sequence
  Description of Artifical Sequence:  Primer/Probe
tagaatcggtggtcctgtccttccc

SEQ ID NO: 1383 - DNA, 23 bp, Artificial Sequence
  Description of Artifical Sequence:  Primer/Probe
catagctgtcttccagggtgaac

SEQ ID NO: 1384 - DNA, 20 bp, Artificial Sequence
  Description of Artifical Sequence:  Primer/Probe
tccagaggctctgtcgtttt

SEQ ID NO: 1385 - DNA, 26 bp, Artificial Sequence
  Description of Artifical Sequence:  Primer/Probe
ttccagagagctgtcagccagcactt

SEQ ID NO: 1386 - DNA, 21 bp, Artificial Sequence
  Description of Artifical Sequence:  Primer/Probe
gaacctgacccttgtctgaaa

SEQ ID NO: 1387 - DNA, 22 bp, Artificial Sequence
  Description of Artifical Sequence:  Primer/Probe
gaccataacagctgcaaactct

SEQ ID NO: 1388 - DNA, 26 bp, Artificial Sequence
  Description of Artifical Sequence:  Primer/Probe
tttcatgaacactgtactggttgcct

SEQ ID NO: 1389 - DNA, 20 bp, Artificial Sequence
  Description of Artifical Sequence:  Primer/Probe
agcccttctggttctttgtg

SEQ ID NO: 1390 - DNA, 22 bp, Artificial Sequence
  Description of Artifical Sequence:  Primer/Probe
gaccataacagctgcaaactct

SEQ ID NO: 1391 - DNA, 26 bp, Artificial Sequence
  Description of Artifical Sequence:  Primer/Probe
ttgaacactgtactggttgccttcac

SEQ ID NO: 1392 - DNA, 19 bp, Artificial Sequence
  Description of Artifical Sequence:  Primer/Probe
ccagagcccttctggttct

SEQ ID NO: 1393 - DNA, 20 bp, Artificial Sequence
  Description of Artifical Sequence:  Primer/Probe
atggactggaaaacctggaa

SEQ ID NO: 1394 - DNA, 29 bp, Artificial Sequence
  Description of Artifical Sequence:  Primer/Probe
ttcctgcaagcagataacaattttatcac

SEQ ID NO: 1395 - DNA, 20 bp, Artificial Sequence
  Description of Artifical Sequence:  Primer/Probe
tgctaaaggcacttggttca

SEQ ID NO: 1396 - DNA, 22 bp, Artificial Sequence
  Description of Artifical Sequence:  Primer/Probe
ggaaaatcattcaccactcaca

SEQ ID NO: 1397 - DNA, 26 bp, Artificial Sequence
  Description of Artifical Sequence:  Primer/Probe
tacaaaaccacgaaccaatcaacaga

SEQ ID NO: 1398 - DNA, 22 bp, Artificial Sequence
  Description of Artifical Sequence:  Primer/Probe
tctgtacaatgagctggcatct

SEQ ID NO: 1399 - DNA, 23 bp, Artificial Sequence
  Description of Artifical Sequence:  Primer/Probe
gaagctgtggattcatctctttt

SEQ ID NO: 1400 - DNA, 32 bp, Artificial Sequence
  Description of Artifical Sequence:  Primer/Probe
tcatctctccttgcctgtatatctttacactc

SEQ ID NO: 1401 - DNA, 21 bp, Artificial Sequence
  Description of Artifical Sequence:  Primer/Probe
ggatgagagcactggagtttg

SEQ ID NO: 1402 - DNA, 20 bp, Artificial Sequence
  Description of Artifical Sequence:  Primer/Probe
ggtccaacagggctatcaat

SEQ ID NO: 1403 - DNA, 26 bp, Artificial Sequence
  Description of Artifical Sequence:  Primer/Probe
tccaaaccacgactgtcgtagcaggt

SEQ ID NO: 1404 - DNA, 21 bp, Artificial Sequence
  Description of Artifical Sequence:  Primer/Probe
tggaattcaagacccttttga

SEQ ID NO: 1405 - DNA, 22 bp, Artificial Sequence
  Description of Artifical Sequence:  Primer/Probe
aaggagctggaagagaagaaga

SEQ ID NO: 1406 - DNA, 26 bp, Artificial Sequence
  Description of Artifical Sequence:  Primer/Probe
tatcagaaactcagccctggacacct

SEQ ID NO: 1407 - DNA, 19 bp, Artificial Sequence
  Description of Artifical Sequence:  Primer/Probe
gctgcgacttggtcttgat

SEQ ID NO: 1408 - DNA, 22 bp, Artificial Sequence
  Description of Artifical Sequence:  Primer/Probe
aatgcagagatcaattcaagga

SEQ ID NO: 1409 - DNA, 26 bp, Artificial Sequence
  Description of Artifical Sequence:  Primer/Probe
taacaagagctgcgatgccttgctct

SEQ ID NO: 1410 - DNA, 22 bp, Artificial Sequence
  Description of Artifical Sequence:  Primer/Probe
tcttcaccttctgattcagcat

SEQ ID NO: 1411 - DNA, 20 bp, Artificial Sequence
  Description of Artifical Sequence:  Primer/Probe
aggacatgctgtggatgaag

SEQ ID NO: 1412 - DNA, 28 bp, Artificial Sequence
  Description of Artifical Sequence:  Primer/Probe
ttcacatctcttatttctcttttcccct

SEQ ID NO: 1413 - DNA, 20 bp, Artificial Sequence
  Description of Artifical Sequence:  Primer/Probe
ccccacataaaggaaatggt

SEQ ID NO: 1414 - DNA, 18 bp, Artificial Sequence
  Description of Artifical Sequence:  Primer/Probe
cccagcttctctgcagga

SEQ ID NO: 1415 - DNA, 23 bp, Artificial Sequence
  Description of Artifical Sequence:  Primer/Probe
tcctcggactcatcggagccatc

SEQ ID NO: 1416 - DNA, 17 bp, Artificial Sequence
  Description of Artifical Sequence:  Primer/Probe
cggcgaggaggagtgtc

SEQ ID NO: 1417 - DNA, 21 bp, Artificial Sequence
  Description of Artifical Sequence:  Primer/Probe
cacagcattgaattgctctgt

SEQ ID NO: 1418 - DNA, 26 bp, Artificial Sequence
  Description of Artifical Sequence:  Primer/Probe
ttctggattttaccaaatggcacacg

SEQ ID NO: 1419 - DNA, 22 bp, Artificial Sequence
  Description of Artifical Sequence:  Primer/Probe
gataactttgtggtccattgga

SEQ ID NO: 1420 - DNA, 21 bp, Artificial Sequence
  Description of Artifical Sequence:  Primer/Probe
cacctgaagaacccacagatt

SEQ ID NO: 1421 - DNA, 29 bp, Artificial Sequence
  Description of Artifical Sequence:  Primer/Probe
ttgctattaaaactacagccatgtcaaag

SEQ ID NO: 1422 - DNA, 21 bp, Artificial Sequence
  Description of Artifical Sequence:  Primer/Probe
gcttgacatggttgggtttat

SEQ ID NO: 1423 - DNA, 20 bp, Artificial Sequence
  Description of Artifical Sequence:  Primer/Probe
ctttccactgctctgcaaag

SEQ ID NO: 1424 - DNA, 26 bp, Artificial Sequence
  Description of Artifical Sequence:  Primer/Probe
taacccagctgtcacccagtacaggt

SEQ ID NO: 1425 - DNA, 22 bp, Artificial Sequence
  Description of Artifical Sequence:  Primer/Probe
gtcctgtacacctctccagatg

SEQ ID NO: 1426 - DNA, 23 bp, Artificial Sequence
  Description of Artifical Sequence:  Primer/Probe
cgacttccagaccatctacaact

SEQ ID NO: 1427 - DNA, 25 bp, Artificial Sequence
  Description of Artifical Sequence:  Primer/Probe
tcttcggctccgacactgagatcat

SEQ ID NO: 1428 - DNA, 20 bp, Artificial Sequence
  Description of Artifical Sequence:  Primer/Probe
ggcacagactcttgctcctt

SEQ ID NO: 1429 - DNA, 21 bp, Artificial Sequence
  Description of Artifical Sequence:  Primer/Probe
catcacgtgtgagctcacagt

SEQ ID NO: 1430 - DNA, 23 bp, Artificial Sequence
  Description of Artifical Sequence:  Primer/Probe
tcttccacatggtgcactgctgc

SEQ ID NO: 1431 - DNA, 22 bp, Artificial Sequence
  Description of Artifical Sequence:  Primer/Probe
agaatttgcagacacagcaatt

SEQ ID NO: 1432 - DNA, 22 bp, Artificial Sequence
  Description of Artifical Sequence:  Primer/Probe
gagctcaccttcacgtgtacat

SEQ ID NO: 1433 - DNA, 24 bp, Artificial Sequence
  Description of Artifical Sequence:  Primer/Probe
tctaccccaggcccaacgtgtact

SEQ ID NO: 1434 - DNA, 22 bp, Artificial Sequence
  Description of Artifical Sequence:  Primer/Probe
gctgttgtccgtcttattgatc

SEQ ID NO: 1435 - DNA, 22 bp, Artificial Sequence
  Description of Artifical Sequence:  Primer/Probe
gagctcaccttcacgtgtacat

SEQ ID NO: 1436 - DNA, 24 bp, Artificial Sequence
  Description of Artifical Sequence:  Primer/Probe
tctaccccaggcccaacgtgtact

SEQ ID NO: 1437 - DNA, 22 bp, Artificial Sequence
  Description of Artifical Sequence:  Primer/Probe
gctgttgtccgtcttattgatc

SEQ ID NO: 1438 - DNA, 22 bp, Artificial Sequence
  Description of Artifical Sequence:  Primer/Probe
gagctcaccttcacgtgtacat

SEQ ID NO: 1439 - DNA, 24 bp, Artificial Sequence
  Description of Artifical Sequence:  Primer/Probe
tctaccccaggcccaacgtgtact

SEQ ID NO: 1440 - DNA, 22 bp, Artificial Sequence
  Description of Artifical Sequence:  Primer/Probe
gctgttgtccgtcttattgatc

SEQ ID NO: 1441 - DNA, 20 bp, Artificial Sequence
  Description of Artifical Sequence:  Primer/Probe
tgccagctgtctttcagagt

SEQ ID NO: 1442 - DNA, 26 bp, Artificial Sequence
  Description of Artifical Sequence:  Primer/Probe
tctttcaaaaggcaaaagtcccttgc

SEQ ID NO: 1443 - DNA, 20 bp, Artificial Sequence
  Description of Artifical Sequence:  Primer/Probe
gcgtctccaggaacaacagt

SEQ ID NO: 1444 - DNA, 22 bp, Artificial Sequence
  Description of Artifical Sequence:  Primer/Probe
tctatggtcatgggtacgaaag

SEQ ID NO: 1445 - DNA, 24 bp, Artificial Sequence
  Description of Artifical Sequence:  Primer/Probe
tacacgatgtccactgggctcaca

SEQ ID NO: 1446 - DNA, 20 bp, Artificial Sequence
  Description of Artifical Sequence:  Primer/Probe
gttgtgttcagcccagtttg

SEQ ID NO: 1447 - DNA, 20 bp, Artificial Sequence
  Description of Artifical Sequence:  Primer/Probe
ttctcactatgtctgctcca

SEQ ID NO: 1448 - DNA, 22 bp, Artificial Sequence
  Description of Artifical Sequence:  Primer/Probe
tatgcagaccctgggcagcttc

SEQ ID NO: 1449 - DNA, 17 bp, Artificial Sequence
  Description of Artifical Sequence:  Primer/Probe
ttccgggcagagctgaa

SEQ ID NO: 1450 - DNA, 22 bp, Artificial Sequence
  Description of Artifical Sequence:  Primer/Probe
tctatggtcatgggtacgaaag

SEQ ID NO: 1451 - DNA, 24 bp, Artificial Sequence
  Description of Artifical Sequence:  Primer/Probe
tacacgatgtccactgggctcaca

SEQ ID NO: 1452 - DNA, 20 bp, Artificial Sequence
  Description of Artifical Sequence:  Primer/Probe
gttgtgttcagcccagtttg

SEQ ID NO: 1453 - DNA, 20 bp, Artificial Sequence
  Description of Artifical Sequence:  Primer/Probe
caaccttcggaaaagcagat

SEQ ID NO: 1454 - DNA, 26 bp, Artificial Sequence
  Description of Artifical Sequence:  Primer/Probe
tctggacatcttggaacacaccaggt

SEQ ID NO: 1455 - DNA, 17 bp, Artificial Sequence
  Description of Artifical Sequence:  Primer/Probe
ggaggacacggcatcct

SEQ ID NO: 1456 - DNA, 19 bp, Artificial Sequence
  Description of Artifical Sequence:  Primer/Probe
aacgcacatagctcggcga

SEQ ID NO: 1457 - DNA, 22 bp, Artificial Sequence
  Description of Artifical Sequence:  Primer/Probe
ttgaccccacaggagcgcctgc

SEQ ID NO: 1458 - DNA, 22 bp, Artificial Sequence
  Description of Artifical Sequence:  Primer/Probe
aaggttgcagctccttctccgt

SEQ ID NO: 1459 - DNA, 22 bp, Artificial Sequence
  Description of Artifical Sequence:  Primer/Probe
gagctgatatgcaaaaggaaag

SEQ ID NO: 1460 - DNA, 26 bp, Artificial Sequence
  Description of Artifical Sequence:  Primer/Probe
tctgactcccaaccactggttctcct

SEQ ID NO: 1461 - DNA, 18 bp, Artificial Sequence
  Description of Artifical Sequence:  Primer/Probe
gcttcttccatcggagca

SEQ ID NO: 1462 - DNA, 18 bp, Artificial Sequence
  Description of Artifical Sequence:  Primer/Probe
gcttcttccatcggagca

SEQ ID NO: 1463 - DNA, 24 bp, Artificial Sequence
  Description of Artifical Sequence:  Primer/Probe
tcaactatcaccgggcctgtctgg

SEQ ID NO: 1464 - DNA, 17 bp, Artificial Sequence
  Description of Artifical Sequence:  Primer/Probe
catggctgaaggctgca

SEQ ID NO: 1465 - DNA, 19 bp, Artificial Sequence
  Description of Artifical Sequence:  Primer/Probe
gagtcagtgttcggagcca

SEQ ID NO: 1466 - DNA, 25 bp, Artificial Sequence
  Description of Artifical Sequence:  Primer/Probe
tctgcccactctacagctttgaccg

SEQ ID NO: 1467 - DNA, 18 bp, Artificial Sequence
  Description of Artifical Sequence:  Primer/Probe
cccagacatgcagcacag

SEQ ID NO: 1468 - DNA, 15 bp, Artificial Sequence
  Description of Artifical Sequence:  Primer/Probe
ggccccagacatgca

SEQ ID NO: 1469 - DNA, 23 bp, Artificial Sequence
  Description of Artifical Sequence:  Primer/Probe
tactctacagctttgaccgcgcg

SEQ ID NO: 1470 - DNA, 19 bp, Artificial Sequence
  Description of Artifical Sequence:  Primer/Probe
gccaactgtgtggtgttca

SEQ ID NO: 1471 - DNA, 20 bp, Artificial Sequence
  Description of Artifical Sequence:  Primer/Probe
tctggacaagcagtgaccat

SEQ ID NO: 1472 - DNA, 26 bp, Artificial Sequence
  Description of Artifical Sequence:  Primer/Probe
taccaccaccaattccaagagagagg

SEQ ID NO: 1473 - DNA, 20 bp, Artificial Sequence
  Description of Artifical Sequence:  Primer/Probe
ttctcagtgtgctggtcaca

SEQ ID NO: 1474 - DNA, 24 bp, Artificial Sequence
  Description of Artifical Sequence:  Primer/Probe
tcaagtcctgagtggagattagat

SEQ ID NO: 1475 - DNA, 26 bp, Artificial Sequence
  Description of Artifical Sequence:  Primer/Probe
ttggtcatcccagaactacctctggc

SEQ ID NO: 1476 - DNA, 23 bp, Artificial Sequence
  Description of Artifical Sequence:  Primer/Probe
cccagaattaccaagtgagtcct

SEQ ID NO: 1477 - DNA, 22 bp, Artificial Sequence
  Description of Artifical Sequence:  Primer/Probe
acacacgctcacagagaagttt

SEQ ID NO: 1478 - DNA, 25 bp, Artificial Sequence
  Description of Artifical Sequence:  Primer/Probe
tctggatgactcctttggccatgac

SEQ ID NO: 1479 - DNA, 21 bp, Artificial Sequence
  Description of Artifical Sequence:  Primer/Probe
ctgcagtcatcacaggtcaag

SEQ ID NO: 1480 - DNA, 21 bp, Artificial Sequence
  Description of Artifical Sequence:  Primer/Probe
ctgcagtcatcacaggtcaag

SEQ ID NO: 1481 - DNA, 26 bp, Artificial Sequence
  Description of Artifical Sequence:  Primer/Probe
tccaaaggagtcatccaggcagacaa

SEQ ID NO: 1482 - DNA, 21 bp, Artificial Sequence
  Description of Artifical Sequence:  Primer/Probe
gaacacacgctcacagagaag

SEQ ID NO: 1483 - DNA, 20 bp, Artificial Sequence
  Description of Artifical Sequence:  Primer/Probe
tgaacaccccaggctcctac

SEQ ID NO: 1484 - DNA, 22 bp, Artificial Sequence
  Description of Artifical Sequence:  Primer/Probe
tcggcttccggctccacactga

SEQ ID NO: 1485 - DNA, 19 bp, Artificial Sequence
  Description of Artifical Sequence:  Primer/Probe
taatggccaggcaggtcct

SEQ ID NO: 1486 - DNA, 19 bp, Artificial Sequence
  Description of Artifical Sequence:  Primer/Probe
gagctgccgcaactcttcc

SEQ ID NO: 1487 - DNA, 25 bp, Artificial Sequence
  Description of Artifical Sequence:  Primer/Probe
tcgcaactctgcctcttcctcatcg

SEQ ID NO: 1488 - DNA, 24 bp, Artificial Sequence
  Description of Artifical Sequence:  Primer/Probe
gacaaacttctctgtgagcgtgtg

SEQ ID NO: 1489 - DNA, 19 bp, Artificial Sequence
  Description of Artifical Sequence:  Primer/Probe
caggcctctgcactttgac

SEQ ID NO: 1490 - DNA, 25 bp, Artificial Sequence
  Description of Artifical Sequence:  Primer/Probe
tctgtctcgtggtatgccaccctgg

SEQ ID NO: 1491 - DNA, 22 bp, Artificial Sequence
  Description of Artifical Sequence:  Primer/Probe
ccaaattctgggttgaagaact

SEQ ID NO: 1492 - DNA, 21 bp, Artificial Sequence
  Description of Artifical Sequence:  Primer/Probe
cgctgtcctgctagtcttgtt

SEQ ID NO: 1493 - DNA, 26 bp, Artificial Sequence
  Description of Artifical Sequence:  Primer/Probe
tatatcaagaacctgcctgcccaggc

SEQ ID NO: 1494 - DNA, 20 bp, Artificial Sequence
  Description of Artifical Sequence:  Primer/Probe
ccttcacctctggacatgtg

SEQ ID NO: 1495 - DNA, 21 bp, Artificial Sequence
  Description of Artifical Sequence:  Primer/Probe
cgctgtcctgctagtcttgtt

SEQ ID NO: 1496 - DNA, 26 bp, Artificial Sequence
  Description of Artifical Sequence:  Primer/Probe
tatatcaagaacctgcctgcccaggc

SEQ ID NO: 1497 - DNA, 20 bp, Artificial Sequence
  Description of Artifical Sequence:  Primer/Probe
ccttcacctctggacatgtg

SEQ ID NO: 1498 - DNA, 20 bp, Artificial Sequence
  Description of Artifical Sequence:  Primer/Probe
tggcccgttagagaattacc

SEQ ID NO: 1499 - DNA, 26 bp, Artificial Sequence
  Description of Artifical Sequence:  Primer/Probe
tacaaaggctcccagtaccagcttgt

SEQ ID NO: 1500 - DNA, 20 bp, Artificial Sequence
  Description of Artifical Sequence:  Primer/Probe
caaatcattcaaggtggctg

SEQ ID NO: 1501 - DNA, 22 bp, Artificial Sequence
  Description of Artifical Sequence:  Primer/Probe
ggtgggctgctataacttgact

SEQ ID NO: 1502 - DNA, 26 bp, Artificial Sequence
  Description of Artifical Sequence:  Primer/Probe
ttgaaagaaacaccatcctgttgcag

SEQ ID NO: 1503 - DNA, 22 bp, Artificial Sequence
  Description of Artifical Sequence:  Primer/Probe
tgttcttcaggttgttctttgc

SEQ ID NO: 1504 - DNA, 21 bp, Artificial Sequence
  Description of Artifical Sequence:  Primer/Probe
cacaaccagctgacagacagt

SEQ ID NO: 1505 - DNA, 25 bp, Artificial Sequence
  Description of Artifical Sequence:  Primer/Probe
tccaccaccttcagcaagctgcata

SEQ ID NO: 1506 - DNA, 22 bp, Artificial Sequence
  Description of Artifical Sequence:  Primer/Probe
gggagagatccaggtattcaag

SEQ ID NO: 1507 - DNA, 21 bp, Artificial Sequence
  Description of Artifical Sequence:  Primer/Probe
gctcacaacaagaacaatctc

SEQ ID NO: 1508 - DNA, 17 bp, Artificial Sequence
  Description of Artifical Sequence:  Primer/Probe
taaggtgccccgaggag

SEQ ID NO: 1509 - DNA, 17 bp, Artificial Sequence
  Description of Artifical Sequence:  Primer/Probe
cacggagttgagtctgg

SEQ ID NO: 1510 - DNA, 21 bp, Artificial Sequence
  Description of Artifical Sequence:  Primer/Probe
cacaaccagctgacagacagt

SEQ ID NO: 1511 - DNA, 25 bp, Artificial Sequence
  Description of Artifical Sequence:  Primer/Probe
tccaccaccttcagcaagctgcata

SEQ ID NO: 1512 - DNA, 22 bp, Artificial Sequence
  Description of Artifical Sequence:  Primer/Probe
gggagagatccaggtattcaag

SEQ ID NO: 1513 - DNA, 21 bp, Artificial Sequence
  Description of Artifical Sequence:  Primer/Probe
attccattgcccaaattaaca

SEQ ID NO: 1514 - DNA, 28 bp, Artificial Sequence
  Description of Artifical Sequence:  Primer/Probe
tccttcaataacaatattattccagccc

SEQ ID NO: 1515 - DNA, 22 bp, Artificial Sequence
  Description of Artifical Sequence:  Primer/Probe
actgtgtccattcacactgtca

SEQ ID NO: 1516 - DNA, 20 bp, Artificial Sequence
  Description of Artifical Sequence:  Primer/Probe
ccattgcccaaattaacatg

SEQ ID NO: 1517 - DNA, 28 bp, Artificial Sequence
  Description of Artifical Sequence:  Primer/Probe
tccttcaataacaatattattccagccc

SEQ ID NO: 1518 - DNA, 22 bp, Artificial Sequence
  Description of Artifical Sequence:  Primer/Probe
actgtgtccattcacactgtca

SEQ ID NO: 1519 - DNA, 22 bp, Artificial Sequence
  Description of Artifical Sequence:  Primer/Probe
gcgtgcacagaaagactttaaa

SEQ ID NO: 1520 - DNA, 28 bp, Artificial Sequence
  Description of Artifical Sequence:  Primer/Probe
ttgatgaaacttttcaatttcctgtagc

SEQ ID NO: 1521 - DNA, 22 bp, Artificial Sequence
  Description of Artifical Sequence:  Primer/Probe
tgaaatgtagttttcggttgct

SEQ ID NO: 1522 - DNA, 20 bp, Artificial Sequence
  Description of Artifical Sequence:  Primer/Probe
actttggaagaggcattgct

SEQ ID NO: 1523 - DNA, 26 bp, Artificial Sequence
  Description of Artifical Sequence:  Primer/Probe
tcagacagattatgggctccatcgct

SEQ ID NO: 1524 - DNA, 21 bp, Artificial Sequence
  Description of Artifical Sequence:  Primer/Probe
ctcgggataaccatgatcact

SEQ ID NO: 1525 - DNA, 22 bp, Artificial Sequence
  Description of Artifical Sequence:  Primer/Probe
gggaccaatgctcaaattactt

SEQ ID NO: 1526 - DNA, 27 bp, Artificial Sequence
  Description of Artifical Sequence:  Primer/Probe
ttcagaaagttccacaagcatctaagg

SEQ ID NO: 1527 - DNA, 22 bp, Artificial Sequence
  Description of Artifical Sequence:  Primer/Probe
atgactccagtgttttcatcca

SEQ ID NO: 1528 - DNA, 14 bp, Artificial Sequence
  Description of Artifical Sequence:  Primer/Probe
gcggtcccggaaca

SEQ ID NO: 1529 - DNA, 22 bp, Artificial Sequence
  Description of Artifical Sequence:  Primer/Probe
tcacgcctggtctctcagtggc

SEQ ID NO: 1530 - DNA, 17 bp, Artificial Sequence
  Description of Artifical Sequence:  Primer/Probe
gcctgctgccacacatt

SEQ ID NO: 1531 - DNA, 19 bp, Artificial Sequence
  Description of Artifical Sequence:  Primer/Probe
ataaagtggtggtgatgcc

SEQ ID NO: 1532 - DNA, 20 bp, Artificial Sequence
  Description of Artifical Sequence:  Primer/Probe
tagtggagccccctgccagt

SEQ ID NO: 1533 - DNA, 16 bp, Artificial Sequence
  Description of Artifical Sequence:  Primer/Probe
gaggaagatggccatg

SEQ ID NO: 1534 - DNA, 20 bp, Artificial Sequence
  Description of Artifical Sequence:  Primer/Probe
actttggaagaggcattgct

SEQ ID NO: 1535 - DNA, 26 bp, Artificial Sequence
  Description of Artifical Sequence:  Primer/Probe
tcagacagattatgggctccatcgct

SEQ ID NO: 1536 - DNA, 21 bp, Artificial Sequence
  Description of Artifical Sequence:  Primer/Probe
ctcgggataaccatgatcact

SEQ ID NO: 1537 - DNA, 22 bp, Artificial Sequence
  Description of Artifical Sequence:  Primer/Probe
gggaccaatgctcaaattactt

SEQ ID NO: 1538 - DNA, 27 bp, Artificial Sequence
  Description of Artifical Sequence:  Primer/Probe
ttcagaaagttccacaagcatctaagg

SEQ ID NO: 1539 - DNA, 22 bp, Artificial Sequence
  Description of Artifical Sequence:  Primer/Probe
atgactccagtgttttcatcca

SEQ ID NO: 1540 - DNA, 22 bp, Artificial Sequence
  Description of Artifical Sequence:  Primer/Probe
tgacaggggatattcatgctaa

SEQ ID NO: 1541 - DNA, 27 bp, Artificial Sequence
  Description of Artifical Sequence:  Primer/Probe
ttggcaataaatactgcctcacagtcc

SEQ ID NO: 1542 - DNA, 22 bp, Artificial Sequence
  Description of Artifical Sequence:  Primer/Probe
agttgcatcacctttgtctttg

SEQ ID NO: 1543 - DNA, 21 bp, Artificial Sequence
  Description of Artifical Sequence:  Primer/Probe
ctacaggaagtgcagcacaac

SEQ ID NO: 1544 - DNA, 26 bp, Artificial Sequence
  Description of Artifical Sequence:  Primer/Probe
tagccagctgaaggcctacctttcct

SEQ ID NO: 1545 - DNA, 28 bp, Artificial Sequence
  Description of Artifical Sequence:  Primer/Probe
gttgttcaaactcagatctaacacttct

SEQ ID NO: 1546 - DNA, 22 bp, Artificial Sequence
  Description of Artifical Sequence:  Primer/Probe
ttcgcaataaatccagtatggt

SEQ ID NO: 1547 - DNA, 29 bp, Artificial Sequence
  Description of Artifical Sequence:  Primer/Probe
ttgctatcaggatttactccaaccatgtc

SEQ ID NO: 1548 - DNA, 22 bp, Artificial Sequence
  Description of Artifical Sequence:  Primer/Probe
ttgttttcaagctcttcaatgg

SEQ ID NO: 1549 - DNA, 21 bp, Artificial Sequence
  Description of Artifical Sequence:  Primer/Probe
gaccccaagtcagaactgttc

SEQ ID NO: 1550 - DNA, 26 bp, Artificial Sequence
  Description of Artifical Sequence:  Primer/Probe
tattgagagcaccctggacgacctct

SEQ ID NO: 1551 - DNA, 22 bp, Artificial Sequence
  Description of Artifical Sequence:  Primer/Probe
gaaatccttcttgacgtctgaa

SEQ ID NO: 1552 - DNA, 19 bp, Artificial Sequence
  Description of Artifical Sequence:  Primer/Probe
cagtttgggaccgacttca

SEQ ID NO: 1553 - DNA, 28 bp, Artificial Sequence
  Description of Artifical Sequence:  Primer/Probe
tcaagactgtgagctatcagtgtaaccc

SEQ ID NO: 1554 - DNA, 21 bp, Artificial Sequence
  Description of Artifical Sequence:  Primer/Probe
tgactgcttccatgacatagc

SEQ ID NO: 1555 - DNA, 22 bp, Artificial Sequence
  Description of Artifical Sequence:  Primer/Probe
ggagtaaccacttcacctcctt

SEQ ID NO: 1556 - DNA, 26 bp, Artificial Sequence
  Description of Artifical Sequence:  Primer/Probe
tccagctgaagtcactcatccaaatc

SEQ ID NO: 1557 - DNA, 22 bp, Artificial Sequence
  Description of Artifical Sequence:  Primer/Probe
aggtacaatcccaaggattgtc

SEQ ID NO: 1558 - DNA, 22 bp, Artificial Sequence
  Description of Artifical Sequence:  Primer/Probe
aggattctggtgttcctcaaat

SEQ ID NO: 1559 - DNA, 27 bp, Artificial Sequence
  Description of Artifical Sequence:  Primer/Probe
ttcttccacaggaactgtgcatatcac

SEQ ID NO: 1560 - DNA, 22 bp, Artificial Sequence
  Description of Artifical Sequence:  Primer/Probe
cgagactgtgaaggattgtcat

SEQ ID NO: 1561 - DNA, 22 bp, Artificial Sequence
  Description of Artifical Sequence:  Primer/Probe
ggatggttccatatcagtgaac

SEQ ID NO: 1562 - DNA, 23 bp, Artificial Sequence
  Description of Artifical Sequence:  Primer/Probe
tctcgtgaccactgggtcctctg

SEQ ID NO: 1563 - DNA, 22 bp, Artificial Sequence
  Description of Artifical Sequence:  Primer/Probe
agaacaatctgggaagcaagtt

SEQ ID NO: 1564 - DNA, 19 bp, Artificial Sequence
  Description of Artifical Sequence:  Primer/Probe
cttcacctgtagctgccca

SEQ ID NO: 1565 - DNA, 25 bp, Artificial Sequence
  Description of Artifical Sequence:  Primer/Probe
tacacgggaaggacctgtgagatgg

SEQ ID NO: 1566 - DNA, 19 bp, Artificial Sequence
  Description of Artifical Sequence:  Primer/Probe
acagaggacgccaagacag

SEQ ID NO: 1567 - DNA, 22 bp, Artificial Sequence
  Description of Artifical Sequence:  Primer/Probe
gagggatattgtcagggtcatc

SEQ ID NO: 1568 - DNA, 26 bp, Artificial Sequence
  Description of Artifical Sequence:  Primer/Probe
taaaagcaacgttctcacttcccttt

SEQ ID NO: 1569 - DNA, 22 bp, Artificial Sequence
  Description of Artifical Sequence:  Primer/Probe
aaatcccaaagaggagaagaaa

SEQ ID NO: 1570 - DNA, 20 bp, Artificial Sequence
  Description of Artifical Sequence:  Primer/Probe
agtcatcaatggctcgcata

SEQ ID NO: 1571 - DNA, 29 bp, Artificial Sequence
  Description of Artifical Sequence:  Primer/Probe
ttcttctggatataaatgataacagccct

SEQ ID NO: 1572 - DNA, 22 bp, Artificial Sequence
  Description of Artifical Sequence:  Primer/Probe
aagtattggaccgggtagaaga

SEQ ID NO: 1573 - DNA, 20 bp, Artificial Sequence
  Description of Artifical Sequence:  Primer/Probe
gagatggatgtggacgactg

SEQ ID NO: 1574 - DNA, 26 bp, Artificial Sequence
  Description of Artifical Sequence:  Primer/Probe
tcctgaatggaggctcttgtgttgac

SEQ ID NO: 1575 - DNA, 20 bp, Artificial Sequence
  Description of Artifical Sequence:  Primer/Probe
acaagcaggtgtaattcccc

SEQ ID NO: 1576 - DNA, 22 bp, Artificial Sequence
  Description of Artifical Sequence:  Primer/Probe
acacattccagactgtgctcat

SEQ ID NO: 1577 - DNA, 25 bp, Artificial Sequence
  Description of Artifical Sequence:  Primer/Probe
tacggcaagctctccttcaccatct

SEQ ID NO: 1578 - DNA, 22 bp, Artificial Sequence
  Description of Artifical Sequence:  Primer/Probe
tccacacgatggactcatagtt

SEQ ID NO: 1579 - DNA, 19 bp, Artificial Sequence
  Description of Artifical Sequence:  Primer/Probe
cagacgcagaggtagctcc

SEQ ID NO: 1580 - DNA, 26 bp, Artificial Sequence
  Description of Artifical Sequence:  Primer/Probe
tcatctgggcactgtgtgttcatgtt

SEQ ID NO: 1581 - DNA, 20 bp, Artificial Sequence
  Description of Artifical Sequence:  Primer/Probe
atttgaaatcacagccatgc

SEQ ID NO: 1582 - DNA, 21 bp, Artificial Sequence
  Description of Artifical Sequence:  Primer/Probe
cattggcagctacaagtgttc

SEQ ID NO: 1583 - DNA, 25 bp, Artificial Sequence
  Description of Artifical Sequence:  Primer/Probe
tctgtcgaactggcttccaccttca

SEQ ID NO: 1584 - DNA, 21 bp, Artificial Sequence
  Description of Artifical Sequence:  Primer/Probe
cctccgacactcgtttacatc

SEQ ID NO: 1585 - DNA, 20 bp, Artificial Sequence
  Description of Artifical Sequence:  Primer/Probe
gcattggcagctacaagtgt

SEQ ID NO: 1586 - DNA, 25 bp, Artificial Sequence
  Description of Artifical Sequence:  Primer/Probe
tctgtcgaactggcttccaccttca

SEQ ID NO: 1587 - DNA, 21 bp, Artificial Sequence
  Description of Artifical Sequence:  Primer/Probe
cctccgacactcgtttacatc

SEQ ID NO: 1588 - DNA, 20 bp, Artificial Sequence
  Description of Artifical Sequence:  Primer/Probe
gtgtctgtctggctggaaac

SEQ ID NO: 1589 - DNA, 26 bp, Artificial Sequence
  Description of Artifical Sequence:  Primer/Probe
ttgcatctctcctgagtgtccttctg

SEQ ID NO: 1590 - DNA, 22 bp, Artificial Sequence
  Description of Artifical Sequence:  Primer/Probe
acaagtacagcaatccgtctgt

SEQ ID NO: 1591 - DNA, 21 bp, Artificial Sequence
  Description of Artifical Sequence:  Primer/Probe
gaccccaagtcagaactgttc

SEQ ID NO: 1592 - DNA, 26 bp, Artificial Sequence
  Description of Artifical Sequence:  Primer/Probe
tattgagagcaccctggacgacctct

SEQ ID NO: 1593 - DNA, 22 bp, Artificial Sequence
  Description of Artifical Sequence:  Primer/Probe
gaaatccttcttgacgtctgaa

SEQ ID NO: 1594 - DNA, 22 bp, Artificial Sequence
  Description of Artifical Sequence:  Primer/Probe
gacaccaggatcttctttgtga

SEQ ID NO: 1595 - DNA, 23 bp, Artificial Sequence
  Description of Artifical Sequence:  Primer/Probe
tcatacctgtggccagcccacaa

SEQ ID NO: 1596 - DNA, 20 bp, Artificial Sequence
  Description of Artifical Sequence:  Primer/Probe
gagttgagcatcagctcgtt

SEQ ID NO: 1597 - DNA, 20 bp, Artificial Sequence
  Description of Artifical Sequence:  Primer/Probe
agctggagcacaggagagat

SEQ ID NO: 1598 - DNA, 26 bp, Artificial Sequence
  Description of Artifical Sequence:  Primer/Probe
tggaagctctcctttgacactcgttc

SEQ ID NO: 1599 - DNA, 20 bp, Artificial Sequence
  Description of Artifical Sequence:  Primer/Probe
acccatggtcttccagaaag

SEQ ID NO: 1600 - DNA, 22 bp, Artificial Sequence
  Description of Artifical Sequence:  Primer/Probe
gctgattgcaagaagatgtttc

SEQ ID NO: 1601 - DNA, 26 bp, Artificial Sequence
  Description of Artifical Sequence:  Primer/Probe
tttttgtcagccctgatttcttcgac

SEQ ID NO: 1602 - DNA, 22 bp, Artificial Sequence
  Description of Artifical Sequence:  Primer/Probe
ccgatatgtcagaatctgcatt

SEQ ID NO: 1603 - DNA, 22 bp, Artificial Sequence
  Description of Artifical Sequence:  Primer/Probe
cccgaaaaggctttatgtattc

SEQ ID NO: 1604 - DNA, 22 bp, Artificial Sequence
  Description of Artifical Sequence:  Primer/Probe
tgtcagtagctttgatgcattg

SEQ ID NO: 1605 - DNA, 27 bp, Artificial Sequence
  Description of Artifical Sequence:  Primer/Probe
cagaaacacaaatgaaaatcctcagga

SEQ ID NO: 1606 - DNA, 21 bp, Artificial Sequence
  Description of Artifical Sequence:  Primer/Probe
gatccaggctctgtcactcac

SEQ ID NO: 1607 - DNA, 18 bp, Artificial Sequence
  Description of Artifical Sequence:  Primer/Probe
attatgggatcagcgttc

SEQ ID NO: 1608 - DNA, 20 bp, Artificial Sequence
  Description of Artifical Sequence:  Primer/Probe
gtggtgctcgttcgaacagt

SEQ ID NO: 1609 - DNA, 20 bp, Artificial Sequence
  Description of Artifical Sequence:  Primer/Probe
ctgggtcttagtccgtggca
